(19) United States
(12) Patent Application Publication
(10) Pub. No.: US 2012/0213773 A1
(43) Pub. Date: Aug. 23, 2012

(54) BINDING DOMAIN-IMMUNOGLOBULIN FUSION PROTEINS

(75) Inventors: Jeffrey A. Ledbetter, Shorline, WA (US); Martha Hayden-Ledbetter, Shoreline, WA (US); Peter A. Thompson, (US)

(73) Assignee: Emergent Product Development Seattle, LLC, Seattle, WA (US)

(21) Appl. No.: 13/396,147

(22) Filed: Feb. 14, 2012

Related U.S. Application Data
(62) Division of application No. 12/541,062, filed on Aug. 13, 2009, now Pat. No. 8,147,835.
Application No. 12/541,062 is a continuation of application No. 10/207,655, filed on Jul. 25, 2002, now Pat. No. 7,754,208.
Application No. 10/207,655 is a continuation-in-part of application No. 10/053,530, filed on Jan. 17, 2002, now abandoned.
(60) Provisional application No. 60/385,691, filed on Jun. 3, 2002.
(60) Provisional application No. 60/367,358, filed on Jan. 17, 2001.

(51) Int. Cl. A61K 39/395; A61P 37/00; A61P 29/00; A61P 19/02; A61P 35/02; A61P 3/10; A61P 25/00; A61P 1/00; A61P 1/04; A61P 35/00; A61P 17/06

(52) U.S. Cl. 424/133.1

(57) ABSTRACT

The invention relates to novel binding domain-immunoglobulin fusion proteins that feature a binding domain for a cognate structure such as an antigen, a counterreceptor or the like, a wild-type IgG1, IGA or IgE hinge region polypeptide or a mutant IgG1 hinge region polypeptide having either zero, one or two cysteine residues, and immunoglobulin CH2 and CH3 domains, and that are capable of ADCC and/or CDC while occurring predominantly as polypeptides that are compromised in their ability to form disulfide-linked multimers. The fusion proteins can be recombinantly produced at high express levels. Also provided are related compositions and methods, including cell surface forms of the fusion proteins and immunotherapeutic applications of the fusion proteins and of polynucleotides encoding such fusion proteins.

### CROSS REFERENCE TO RELATED APPLICATIONS

[0001] This application is a continuation of U.S. application Ser. No. 10/207,655, filed Jul. 25, 2002, now pending; which is a Continuation-in-Part of U.S. application Ser. No. 10/053,530, filed Jan. 17, 2002 (now abandoned); which claims the benefit under U.S.C. §119(e) of U.S. Provisional Application No. 60/367,358, filed Jan. 17, 2001; U.S. application Ser. No. 10/207,655 also claims the benefit under U.S.C. §119(e) of U.S. Provisional Application No. 60/385,691 filed on Jun. 3, 2002. All of the above applications are incorporated herein by reference in their entireties.

### STATEMENT REGARDING SEQUENCE LISTING

[0002] The Sequence Listing associated with this application is provided in text format in lieu of a paper copy, and is hereby incorporated by reference into the specification. The name of the text file containing the Sequence Listing is 910180_{—}401C12_SEQUENCE_LISTING.txt. The text file is 1,394 KB, was created on Aug. 13, 2009, and is being submitted electronically via EFS-Web, concurrent with the filing of the specification.

### BACKGROUND

[0003] 1. Technical Field

[0004] The present invention relates generally to immunologically active, recombinant binding proteins, and in particular, to molecularly engineered binding domain-immunoglobulin fusion proteins, including single chain Fv-immunoglobulin fusion proteins. The present invention also relates to compositions and methods for treating malignant conditions and B-cell disorders, including diseases characterized by autoantibody production.

[0005] 2. Description of the Related Art

[0006] An immunoglobulin molecule is a multimeric protein composed of two identical light chain polypeptides and two identical heavy chain polypeptides (H₂L₂) that are joined into a macromolecular complex by interchain disulfide bonds. Intrachain disulfide bonds join different areas of the same polypeptide chain, which results in the formation of loops that, along with adjacent amino acids, constitute the immunoglobulin domains. At the amino-terminal portion, each light chain and each heavy chain has a single variable region that shows considerable variation in amino acid composition from one antibody to another. The light chain variable region, V_{L}, associates with the variable region of a heavy chain, V_{H}, to form the antigen binding site of the immunoglobulin, Fv. Light chains have a single constant region domain and heavy chains have several constant region domains. Classes IgG, IgA, and IgD have three constant region domains, which are designated CH1, CH2, and CH3, and the IgM and IgE classes have four constant region domains, CH1, CH2, CH3 and CH4. Immunoglobulin structure and function are reviewed, for example, in Harlow et al., Eds., Antibodies: A Laboratory Manual, Chapter 14, Cold Spring Harbor Laboratory, Cold Spring Harbor (1988).

[0007] The heavy chains of immunoglobulins can be divided into three functional regions: Fd (fragment comprising VH and CH1), hinge, and Fc (fragment crystallizable, derived from constant regions). The Fd region comprises the V_{H} and CH1 domains and in combination with the light chain forms Fab, the antigen-binding fragment. The Fc fragment is generally considered responsible for the effector functions of an immunoglobulin, such as complement fixation and binding to Fc receptors. The hinge region, found in IgG, IgA, and IgD classes, acts as a flexible spacer, allowing the Fab portion to move freely in space. In contrast to the constant regions, the hinge domains are structurally diverse, varying in both sequence and length among immunoglobulin classes and subclasses. For example, three human IgG subclasses, IgG1, IgG2, and IgG4, have hinge regions of 12-15 amino acids, while IgG3-derived hinge regions can comprise approximately 62 amino acids, including around 21 proline residues and around 11 cysteine residues.

[0008] According to crystallographic studies, the immunoglobulin hinge region can be further subdivided functionally into three regions: the upper hinge, the core, and the lower hinge (Shin et al., Immunological Reviews 130:87 (1992)). The upper hinge includes amino acids from the carboxyl end of CH1 to the first residue in the hinge that restricts motion, generally the first cysteine residue that forms an interchain disulfide bond between the two heavy chains. The length of the upper hinge region correlates with the segmental flexibility of the antibody. The core hinge region contains the inter-heavy chain disulfide bridges, and the lower hinge region joins the amino terminal end of the CH2 domain and includes residues in CH2. (Id.) The core hinge region of human IgG1 contains the sequence Cys-Pro-Pro-Cys (SEQ ID NO: 40) which, when dimerized by disulfide bond formation, results in a cyclic octapeptide believed to act as a pivot, thus conferring flexibility. The hinge region may also contain one or more glycosylation sites, which include a number of structurally distinct types of sites for carbohydrate attachment. For example, IgA1 contains five glycosylation sites within a 17 amino acid segment of the hinge region, conferring exceptional resistance of the hinge region polypeptide to intestinal proteases, considered an advantageous property for a secretory immunoglobulin.

[0009] Conformational changes permitted by the structure and flexibility of the immunoglobulin hinge region polypeptide sequence may affect the effector functions of the Fc portion of the antibody. Three general categories of effector functions associated with the Fc region include (1) activation of the classical complement cascade, (2) interaction with effector cells, and (3) compartmentalization of immunoglobulins. The different human IgG subclasses vary in the relative efficacies with which they fix complement, or activate and amplify the steps of the complement cascade (e.g., Kirschfink, 2001 Immunol. Rev. 180:177; Chakraborti et al., 2000 Cell Signal 12:607; Kohl et al., 1999 Mol. Immunol. 36:893; Marsh et al., 1999 Curr. Opin. Nephrol. Hypertens. 8:557; Speth et al., 1999 Wien Klin. Wochenschr. 111:378). Complement-dependent cytotoxicity (CDC) is believed to be a significant mechanism for clearance of specific target cells such as tumor cells. In general, IgG1 and IgG3 most effectively fix complement, IgG2 is less effective, and IgG4 does not activate complement. Complement activation is initiated by binding of C1q, a subunit of the first component C1 in the cascade, to an antigen-antibody complex. Even though the binding site for C1q is located in the CH2 domain of the antibody, the hinge region influences the ability of the antibody to activate the cascade. For example, recombinant immunoglobulins lacking a hinge region are unable to activate complement. (Shin et al., 1992) Without the flexibility conferred by the hinge region, the Fab portion of the antibody bound to the antigen may not be able to adopt the conformation required to permit C1q to bind to CH2. (See id.) Hinge length and segmental flexibility have been correlated with complement activation; however, the correlation is not absolute. Human IgG3 molecules with altered hinge regions that are as rigid as IgG4 can still effectively activate the cascade.

[0010] The absence of a hinge region, or a lack of a functional hinge region, can also affect the ability of certain human IgG immunoglobulins to bind Fc receptors on immune effector cells. Binding of an immunoglobulin to an Fc receptor facilitates antibody-dependent cell-mediated cytotoxicity (ADCC), which is presumed to be an important mechanism for the elimination of tumor cells. The human IgG Fc receptor (FcR) family is divided into three groups, FcγRI (CD64), which is capable of binding IgG with high affinity, and FcγRII (CD32) and FcγRIII (CD16), both of which are low affinity receptors. The molecular interaction between each of the three receptors and an immunoglobulin has not been defined precisely, but experimental evidence indicates that residues in the hinge proximal region of the CH2 domain are important to the specificity of the interaction between the antibody and the Fc receptor. In addition, IgG1 myeloma proteins and recombinant IgG3 chimeric antibodies that lack a hinge region are unable to bind FcγRI, likely because accessibility to CH2 is decreased. (Shin et al., Intern. Rev. Immunol. 10:177, 178-79 (1993).)

[0011] Unusual and apparently evolutionarily unrelated exceptions to the H₂L₂ structure of conventional antibodies occur in some isotypes of the immunoglobulins found in camelids (Hamers-Casterman et al., 1993 Nature 363:446; Nguyen et al., 1998 J. Mol. Biol 275:413) and in nurse sharks (Roux et al., 1998 Proc. Nat. Acad. Sci. USA 95:11804). These antibodies form their antigen-binding pocket using the heavy chain variable region alone. In both species, these variable regions often contain an extended third complementarity determining region (CDR3) to help compensate for the lack of a light chain variable region, and there are frequent disulfide bonds between CDR regions to help stabilize the binding site [Muyldermans et al., 1994 Prot. Engineer. 7:1129; Roux et al., 1998]. However, the function of the heavy chain-only antibodies is unknown, and the evolutionary pressure leading to their formation has not been identified. Since camelids, including camels, llamas, and alpacas, also express conventional H₂L₂ antibodies, the heavy chain-only antibodies do not appear to be present in these animals simply as an alternative antibody structure.

[0012] Variable regions (V_{H}H) of the camelid heavy chain-only immunoglobulins contain amino acid substitutions at several positions outside of the CDR regions when compared with conventional (H₂L₂) heavy chain variable regions. These amino acid substitutions are encoded in the germ line [Nguyen et al., 1998 J. Mol. Biol 275:413] and are located at residues that normally form the hydrophobic interface between conventional V_{H} and V_{L} domains [Muyldermans et al., 1994 Prot. Engineer. 7:1129]. Camelid V_{H}H recombine with IgG2 and IgG3 constant regions that contain hinge, CH2, and CH3 domains but which lack a CH1 domain [Hamers-Casterman et al., 1993 Nature 363:446]. Interestingly, V_{H}H are encoded by a chromosomal locus distinct from the V_{H} locus [Nguyen, 1998], indicating that camelid B cells have evolved complex mechanisms of antigen recognition and differentiation. Thus, for example, llama IgG1 is a conventional (H₂L₂) antibody isotype in which V_{H} recombines with a constant region that contains hinge, CH1, CH2 and CH3 domains, whereas the llama IgG2 and IgG3 are heavy chain-only isotypes that lack CH1 domains and that contain no light chains.

[0013] Monoclonal antibody technology and genetic engineering methods have led to rapid development of immunoglobulin molecules for diagnosis and treatment of human diseases. Protein engineering has been applied to improve the affinity of an antibody for its cognate antigen, to diminish problems related to immunogenicity of administered recombinant polypeptides, and to alter antibody effector functions. The domain structure of immunoglobulins is amenable to recombinant engineering, in that the antigen binding domains and the domains conferring effector functions may be exchanged between immunoglobulin classes (e.g., IgG, IgA, IgE) and subclasses (e.g., IgG1, IgG2, IgG3, etc.).

[0014] In addition, smaller immunoglobulin molecules have been constructed to overcome problems associated with whole immunoglobulin therapy. For instance, single chain immunoglobulin variable region fragment polypeptides (scFv) comprise an immunoglobulin heavy chain variable domain joined via a short linker peptide to an immunoglobulin light chain variable domain (Huston et al. Proc. Natl. Acad. Sci. USA, 85: 5879-83, 1988). Because of the small size of scFv molecules, they exhibit very rapid clearance from plasma and tissues and are capable of more effective penetration into tissues than whole immunoglobulins. (see, e.g., Jain, 1990 Cancer Res. 50:814s-819s.) An anti-tumor scFv showed more rapid tumor penetration and more even distribution through the tumor mass than the corresponding chimeric antibody (Yokota et al., Cancer Res. 52, 3402-08 (1992)). Fusion of an scFv to another molecule, such as a toxin, takes advantage of the specific antigen-binding activity and the small size of an scFv to deliver the toxin to a target tissue. (Chaudary et al., Nature 339:394 (1989); Batra et al., Mol. Cell. Biol. 11:2200 (1991).)

[0015] Despite the advantages that scFv molecules bring to serotherapy, several drawbacks to this therapeutic approach exist. While rapid clearance of scFv may reduce toxic effects in normal cells, such rapid clearance may prevent delivery of a minimum effective dose to the target tissue. Manufacturing adequate amounts of scFv for administration to patients has been challenging due to difficulties in expression and isolation of scFv that adversely affect the yield. During expression, scFv molecules lack stability and often aggregate due to pairing of variable regions from different molecules. Furthermore, production levels of scFv molecules in mammalian expression systems are low, limiting the potential for efficient manufacturing of scFv molecules for therapy (Davis et al, J. Biol. Chem. 265:10410-18 (1990); Traunecker et al., EMBO J. 10: 3655-59 (1991)). Strategies for improving production have been explored, including addition of glycosylation sites to the variable regions (e.g., U.S. Pat. No. 5,888,773; Jost et al, J. Biol. Chem. 269: 26267-73 (1994)).

[0016] An additional disadvantage to using scFv for therapy is the lack of effector function. An scFv that lacks the cytolytic functions, ADCC and complement dependent-cytotoxicity (CDC), which are typically associated with immunoglobulin constant regions, may be ineffective for treating disease. Even though development of scFv technology began over 12 years ago, currently no scFv products are approved for therapy. Conjugation or fusion of toxins to scFV has thus been an alternative strategy to provide a potent, antigen-specific molecule, but dosing with such conjugates or chimeras is often limited by excessive and/or non-specific toxicity having its origin in the toxin moiety of such preparations. Toxic effects may include supraphysiological elevation of liver enzymes and vascular leak syndrome, and other undesired effects. In addition, immunotoxins are themselves highly immunogenic after being administered to a host, and host antibodies generated against the immunotoxin limit its potential usefulness in repeated therapeutic treatments of an individual.

[0017] The benefits of immunoglobulin constant region-associated effector functions in the treatment of disease has prompted development of fusion proteins in which immunoglobulin constant region polypeptide sequences are present and nonimmunoglobulin sequences are substituted for the antibody variable region. For example, CD4, the T cell surface protein recognized by HIV, was recombinantly fused to an immunoglobulin Fc effector domain. (See Sensel et al., Chem. Immunol. 65:129-158 (1997).) The biological activity of such a molecule will depend in part on the class or subclass of the constant region chosen. An IL-2-IgG1 fusion protein effected complement-mediated lysis of IL-2 receptor-bearing cells. (See id.) Use of immunoglobulin constant regions to construct these and other fusion proteins may also confer improved pharmacokinetic properties.

[0018] Diseases and disorders thought to be amenable to some type of immunoglobulin therapy include cancer and immune system disorders. Cancer includes a broad range of diseases, affecting approximately one in four individuals worldwide. Rapid and unregulated proliferation of malignant cells is a hallmark of many types of cancer, including hematological malignancies. Patients with a hematologic malignant condition have benefited most from advances in cancer therapy in the past two decades (Multani et al., J. Clin. Oncology 16: 3691-3710, 1998). Although remission rates have increased, most patients still relapse and succumb to their disease. Barriers to cure with cytotoxic drugs include tumor cell resistance and the high toxicity of chemotherapy, which prevents optimal dosing in many patients. New treatments based on targeting with molecules that specifically bind to a malignant cell, including monoclonal antibodies (mAbs), can improve effectiveness without increasing toxicity.

[0019] Since monoclonal antibodies (mAb) were first described in 1975 (Kohler et al., Nature 256:495-97 (1975)), many patients have been treated with mAbs that specifically bind to tumor antigens, or antigens expressed on tumor cells. These studies have yielded important lessons regarding the selection of tumor cell surface antigens that are tumor antigens suitable for use as immunotherapy targets. First, it is highly preferable that such a target antigen is not expressed by normal tissues the preservation of which is important to host survival. Fortunately, in the case of hematologic malignancy, malignant cells express many antigens that are not expressed on the surfaces of stem cells or other essential cells. Treatment of a hematologic malignant condition using a therapeutic regimen that depletes both normal and malignant cells of hematological origin has been acceptable where regeneration of normal cells from progenitors can occur after therapy has ended. Second, the target antigen should be expressed on all or virtually all clonogenic populations of tumor cells, and expression should persist despite the selective pressure from immunoglobulin therapy. Thus, a strategy that employs selection of a cell surface idiotype (e.g., a particular idiotope) as a target for therapy of B cell malignancy has been limited by the outgrowth of tumor cell variants with altered surface idiotype expression, even where the antigen exhibits a high degree of tumor selectivity (Meeker et al., N. Engl. J. Med. 312:1658-65 (1985)). Third, the selected antigen must traffic properly after an immunoglobulin binds to it. Shedding or internalization of a cell surface target antigen after an immunoglobulin binds to the antigen may allow tumor cells to escape destruction, thus limiting the effectiveness of serotherapy. Fourth, binding of an immunoglobulin to cell surface target antigens that transmit or transduce cellular activation signals may result in improved functional responses to immunotherapy in tumor cells, and can lead to growth arrest and/or apoptosis. While all of these properties are important, the triggering of apoptosis after an immunoglobulin binds to the target antigen may be a critical factor in achieving successful serotherapy.

[0020] Antigens that have been tested as targets for serotherapy of B and T cell malignancies include Ig idiotype (Brown et al., Blood 73:651-61 (1989)), CD19 (Hekman et al., Cancer Immunol. Immunother. 32:364-72 (1991); Vlasveld et al., Cancer Immunol. Immunother. 40: 37-47 (1995)), CD20 (Press et al., Blood 69: 584-91 (1987); Maloney et al., J. Clin. Oncol. 15:3266-74, (1997)) CD21 (Scheinberg et. al., J. Clin. Oncol. 8:792-803, (1990)), CD5 (Dillman et. al., J. Biol. Respn. Mod. 5:394-410 (1986)), and CD52 (CAMPATH) (Pawson et al., J. Clin. Oncol. 15:2667-72, (1997)). Of these, the most success has been obtained using CD20 as a target for therapy of B cell lymphomas. Each of the other targets has been limited by the biological properties of the antigen. For example, surface idiotype can be altered through somatic mutation, allowing tumor cell escape. As other examples, CD5, CD21, and CD19 are rapidly internalized after mAb binding, allowing tumor cells to escape destruction unless mAbs are conjugated with toxin molecules. CD22 is expressed on only a subset of B cell lymphomas, thereby limiting its usefulness, while CD52 is expressed on both T cells and B cells and may therefore generate counterproductive immunosuppression by effecting selective T cell depletion.

[0021] CD20 fulfills the basic criteria described above for selection of an appropriate target antigen for therapy of a B cell malignant condition. Treatment of patients with low grade or follicular B cell lymphoma using chimeric CD20 mAb induces partial or complete responses in many patients (McLaughlin et al, Blood 88:90a (abstract, suppl. 1) (1996); Maloney et al, Blood 90: 2188-95 (1997)). However, tumor relapse commonly occurs within six months to one year. Therefore, further improvements in serotherapy are needed to induce more durable responses in low grade B cell lymphoma, and to allow effective treatment of high grade lymphoma and other B cell diseases.

[0022] One approach to improving CD20 serotherapy has been to target radioisotopes to B cell lymphomas using mAbs specific for CD20. While the effectiveness of therapy is increased, associated toxicity from the long in vivo half-life of the radioactive antibody increases also, sometimes requiring that the patient undergo stem cell rescue (Press et al., N. Eng. J. Med. 329: 1219-1224, 1993; Kaminski et al., N. Eng. J. Med. 329:459-65 (1993)). MAbs to CD20 have been cleaved with proteases to yield F(ab′)₂ or Fab fragments prior to attachment of the radioisotope. This improves penetration of the radioisotope conjugate into the tumor, and shortens the in vivo half-life, thus reducing the toxicity to normal tissues. However, the advantages of effector functions, including complement fixation and/or ADCC that would otherwise be provided by the Fc region of the CD20 mAb, are lost since the Fab preparations lack immunoglobulin Fc domains. Therefore, for improved delivery of radioisotopes, a strategy is needed to make a CD20 mAb derivative that retains Fc-dependent effector functions but which is smaller in size, thereby increasing tumor penetration and shortening mAb half-life.

[0023] CD20 was the first human B cell lineage-specific surface molecule identified by a monoclonal antibody, but the function of CD20 in B cell biology is still incompletely understood. CD20 is a non-glycosylated, hydrophobic 35 kDa B cell transmembrane phosphoprotein that has both amino and carboxy ends situated in the cytoplasm (Einfeld et al, EMBO J. 7:711-17 (1988)). Natural ligands for CD20 have not been identified. CD20 is expressed by all normal mature B cells, but is not expressed by precursor B cells.

[0024] CD20 mAbs deliver signals to normal B cells that affect viability and growth (Clark et al., Proc. Natl. Acad. Sci. USA 83:4494-98 (1986)), and extensive cross-linking of CD20 can induce apoptosis in B lymphoma cell lines (Shan et al., Blood 91:1644-52 (1998)). Cross-linking of CD20 on the cell surface increases the magnitude and enhances the kinetics of signal transduction, for example, as detected by measuring tyrosine phosphorylation of cellular substrates (Deans et al., J. Immunol. 146:846-53 (1993)). Significantly, apoptosis in Ramos B lymphoma cells can also be induced by FcR cross-linking CD20 mAbs bound to the Ramos cell surfaces, by the addition of Fc-receptor positive cells (Shan et al., Blood 91: 1644-52 (1998)). Therefore, in addition to cellular depletion by complement and ADCC mechanisms, Fc-receptor binding by CD20 mAbs in vivo can promote apoptosis of malignant B cells by CD20 cross-linking. This theory is consistent with experiments showing that effectiveness of CD20 therapy of human lymphoma in a SCID mouse model was dependent upon Fc-receptor binding by the CD20 mAb (Funakoshi et al., J. Immunotherapy 19:93-101 (1996)).

[0025] The CD20 polypeptide contains four transmembrane domains (Einfeld et al., EMBO J. 7: 711-17, (1988); Stamenkovic et al., J. Exp. Med. 167:1975-80 (1988); Tedder et. al., J. Immunol. 141:4388-4394 (1988)). The multiple membrane spanning domains prevent CD20 internalization after antibody binding. This property of CD20 was recognized as an important feature for effective therapy of B cell malignancies when a murine CD20 mAb, 1F5, was injected into patients with B cell lymphoma, resulting in significant depletion of malignant cells and partial clinical responses (Press et al., Blood 69: 584-91 (1987)).

[0026] Because normal mature B cells also express CD20, normal B cells are depleted during CD20 antibody therapy (Reff, M. E. et al, Blood 83: 435-445, 1994). However, after treatment is completed, normal B cells are regenerated from CD20 negative B cell precursors; therefore, patients treated with anti-CD20 therapy do not experience significant immunosuppression. Depletion of normal B cells may also be beneficial in diseases that involve inappropriate production of autoantibodies or other diseases where B cells may play a role. A chimeric mAb specific for CD20, consisting of heavy and light chain variable regions of mouse origin fused to human IgG1 heavy chain and human kappa light chain constant regions, retained binding to CD20 and the ability to mediate ADCC and to fix complement (Liu et al., J. Immunol. 139:3521-26 (1987); Robinson et al., U.S. Pat. No. 5,500,362). This work led to development of a chimeric CD20 mAb, Rituximab™, currently approved by the U.S. Food and Drug Administration for approval for therapy of B cell lymphomas. While clinical responses are frequently observed after treatment with Rituximab™, patients often relapse after about 6-12 months.

[0027] High doses of Rituximab™ are required for intravenous injection because the molecule is large, approximately 150 kDa, and diffusion is limited into the lymphoid tissues where many tumor cells reside. The mechanism of anti-tumor activity of Rituximab™ is thought to be a combination of several activities, including ADCC, complement fixation, and triggering of signals that promote apoptosis in malignant B cells. The large size of Rituximab™ prevents optimal diffusion of the molecule into lymphoid tissues that contain malignant B cells, thereby limiting these anti-tumor activities. As discussed above, cleavage of CD20 mAbs with proteases into Fab or F(ab′)₂ fragments makes them smaller and allows better penetration into lymphoid tissues, but the effector functions important for anti-tumor activity are lost. While CD20 mAb fragments may be more effective than intact antibody for delivery of radioisotopes, it would be desirable to construct a CD20 mAb derivative that retains the effector functions of the Fc portion, but that has a smaller molecular size, facilitating better tumor penetration and resulting in a shorter half-life.

[0028] CD20 is expressed by many malignant cells of B cell origin, including B cell lymphoma and chronic lymphocytic leukemia (CLL). CD20 is not expressed by malignancies of pre-B cells, such as acute lymphoblastic leukemia. CD20 is therefore a good target for therapy of B cell lymphoma, CLL, and other diseases in which B cells are involved in the pathogenesis and/or progression of disease. Other B cell disorders include autoimmune diseases in which autoantibodies are produced during or after the differentiation of B cells into plasma cells. Examples of B cell disorders include autoimmune thyroid disease, including Graves' disease and Hashimoto's thyroiditis, rheumatoid arthritis, systemic lupus erythematosus (SLE), Sjogrens syndrome, immune thrombocytopenic purpura (ITP), multiple sclerosis (MS), myasthenia gravis (MG), psoriasis, scleroderma, and inflammatory bowel disease, including Crohn's disease and ulcerative colitis.

[0029] In view of the foregoing, there is clearly a need for improved compositions and methods to treat malignant conditions in general, and in particular B cell disorders. As described in greater detail herein, the compositions and methods of the present invention overcome the limitations of the prior art by providing a binding domain-immunoglobulin fusion protein that specifically binds to an antigen and that is capable of mediating ADCC or complement fixation. Furthermore, the compositions and methods offer other related advantages.

### BRIEF SUMMARY

[0030] It is an aspect of the present invention to provide a binding domain-immunoglobulin fusion protein, comprising (a) a binding domain polypeptide that is fused to an immunoglobulin hinge region polypeptide, wherein said hinge region polypeptide is selected from the group consisting of (i) a wild-type human IgG1 immunoglobulin hinge region polypeptide, (ii) a mutated human IgG1 immunoglobulin hinge region polypeptide that is derived from a wild-type immunoglobulin hinge region polypeptide having three or more cysteine residues, wherein said mutated human IgG1 immunoglobulin hinge region polypeptide contains two cysteine residues and wherein a first cysteine of the wild-type hinge region is not mutated, (iii) a mutated human IgG1 immunoglobulin hinge region polypeptide that is derived from a wild-type immunoglobulin hinge region polypeptide having three or more cysteine residues, wherein said mutated human IgG1 immunoglobulin hinge region polypeptide contains no more than one cysteine residue, and (iv) a mutated human IgG1 immunoglobulin hinge region polypeptide that is derived from a wild-type immunoglobulin hinge region polypeptide having three or more cysteine residues, wherein said mutated human IgG1 immunoglobulin hinge region polypeptide contains no cysteine residues; (b) an immunoglobulin heavy chain CH2 constant region polypeptide that is fused to the hinge region polypeptide; and (c) an immunoglobulin heavy chain CH3 constant region polypeptide that is fused to the CH2 constant region polypeptide, wherein (1) the binding domain-immunoglobulin fusion protein is capable of at least one immunological activity selected from the group consisting of antibody dependent cell-mediated cytotoxicity and complement fixation, and (2) the binding domain polypeptide is capable of specifically binding to an antigen.

[0031] In certain embodiments the immunoglobulin hinge region polypeptide is a mutated hinge region polypeptide and exhibits a reduced ability to dimerize, relative to a wild-type human immunoglobulin G hinge region polypeptide. In certain embodiments the binding domain polypeptide comprises at least one immunoglobulin variable region polypeptide that is selected an immunoglobulin light chain variable region polypeptide or an immunoglobulin heavy chain variable region polypeptide. In certain further embodiments the binding domain-immunoglobulin fusion protein comprises an immunoglobulin heavy chain variable region polypeptide, wherein the heavy chain variable region polypeptide is a human immunoglobulin heavy chain variable region polypeptide comprising a mutation at an amino acid at a location corresponding to amino acid position 11 in the VH domain, or amino acid position 155 in SEQ ID NO: 11, position 158 in SEQ ID NO: 12, position 154 in SEQ ID NO:13, or position 159 in SEQ ID NO 14, or amino acid position 11 in the VH domain polypeptides listed in SEQ ID NOS: 341, 354, 465, 471, 477, 548. In certain embodiments the immunoglobulin variable region polypeptide is derived from a human immunoglobulin, and in certain other embodiments the immunoglobulin variable region polypeptide comprises a humanized immunoglobulin polypeptide sequence. In certain embodiments the immunoglobulin variable region polypeptide is derived from a murine immunoglobulin.

[0032] According to certain embodiments of the present invention, the binding domain polypeptide comprises (a) at least one immunoglobulin light chain variable region polypeptide; (b) at least one immunoglobulin heavy chain variable region polypeptide; and (c) at least one linker polypeptide that is fused to the polypeptide of (a) and to the polypeptide of (b). In certain further embodiments the immunoglobulin light chain variable region and heavy chain variable region polypeptides are derived from human immunoglobulins, and in certain other further embodiments the linker polypeptide comprises at least one polypeptide having as an amino acid sequence Gly-Gly-Gly-Gly-Ser [SEQ ID NO: 39]. In other embodiments the linker polypeptide comprises at least three repeats of a polypeptide having as an amino acid sequence Gly-Gly-Gly-Gly-Ser [SEQ ID NO: 39]. In other embodiments the linker comprises a glycosylation site, which in certain further embodiments is an asparagine-linked glycosylation site, an O-linked glycosylation site, a C-mannosylation site, a glypiation site or a phosphoglycation site. In another embodiment at least one of the immunoglobulin heavy chain CH2 constant region polypeptide and the immunoglobulin heavy chain CH3 constant region polypeptide is derived from a human immunoglobulin heavy chain. In another embodiment the immunoglobulin heavy chain constant region CH2 and CH3 polypeptides are of an isotype that is human IgG or human IgA. In certain other embodiments the antigen is CD19, CD20, CD22, CD37, CD40, L6, CD2, CD28, CD30, CD40, CD50 (ICAM3), CD54 (ICAM1), CD80, CD86, B7-H1, CD134 (OX40), CD137 (41BB), CD152 (CTLA-4), CD153 (CD30 ligand), CD154 (CD40 ligand), ICOS, CD19, CD3, CD4, CD25, CD8, CD11b, CD14, CD25, CD56 or CD69. In another embodiment the binding domain polypeptide comprises a CD154 extracellular domain. In still another embodiment the binding domain polypeptide comprises a CD154 extracellular domain and at least one immunoglobulin variable region polypeptide. In another embodiment the binding domain polypeptide comprises a CTLA-4 extracellular domain, and in further embodiments at least one of the immunoglobulin heavy chain constant region polypeptides selected from a CH2 constant region polypeptide and a CH3 constant region polypeptide is a human IgG1 constant region polypeptide. In another further embodiment at least one of the immunoglobulin heavy chain constant region polypeptides selected from a CH2 constant region polypeptide and a CH3 constant region polypeptide is a human IgA constant region polypeptide.

[0033] Turning to another embodiment, the present invention provides a binding domain-immunoglobulin fusion protein, comprising (a) a binding domain polypeptide that is fused to an immunoglobulin hinge region polypeptide; (b) an immunoglobulin heavy chain CH2 constant region polypeptide that is fused to the hinge region polypeptide; and (c) an immunoglobulin heavy chain CH3 constant region polypeptide that is fused to the CH2 constant region polypeptide, wherein (1) the binding domain polypeptide comprises a CTLA-4 extracellular domain that is capable of specifically binding to at least one CTLA-4 ligand selected from the group consisting of CD80 and CD86, (2) the immunoglobulin hinge region polypeptide comprises a polypeptide that is selected from the group consisting of a human IgA hinge region polypeptide and a human IgG1 hinge region polypeptide, (3) the immunoglobulin heavy chain CH2 constant region polypeptide comprises a polypeptide that is selected from the group consisting of a human IgA heavy chain CH2 constant region polypeptide and a human IgG1 heavy chain CH2 constant region polypeptide, (4) the immunoglobulin heavy chain CH3 constant region polypeptide comprises a polypeptide that is selected from the group consisting of a human IgA heavy chain CH3 constant region polypeptide and a human IgG1 heavy chain CH3 constant region polypeptide, and (5) the binding domain-immunoglobulin fusion protein is capable of at least one immunological activity selected from the group consisting of antibody dependent cell-mediated cytotoxicity and complement fixation.

[0034] In another embodiment the present invention provides a binding domain-immunoglobulin fusion protein, comprising (a) a binding domain polypeptide that is fused to an immunoglobulin hinge region polypeptide, wherein said hinge region polypeptide comprises a human IgE hinge region polypeptide; (b) an immunoglobulin heavy chain CH2 constant region polypeptide that is fused to the hinge region polypeptide, wherein said CH2 constant region polypeptide comprises a human IgE CH2 constant region polypeptide; and (c) an immunoglobulin heavy chain CH3 constant region polypeptide that is fused to the CH2 constant region polypeptide, wherein said CH3 constant region polypeptide comprises a human IgE CH3 constant region polypeptide wherein (1) the binding domain-immunoglobulin fusion protein is capable of at least one immunological activity selected from antibody dependent cell-mediated cytotoxicity and induction of an allergic response mechanism, and (2) the binding domain polypeptide is capable of specifically binding to an antigen. In a further embodiment the binding domain-immunoglobulin fusion protein comprises a human IgE CH4 constant region polypeptide. In another further embodiment the antigen is a tumor antigen.

[0035] In certain other embodiments the present invention provides a binding domain-immunoglobulin fusion protein, comprising (a) a binding domain polypeptide that is fused to an immunoglobulin hinge region polypeptide, wherein the binding domain polypeptide is capable of specifically binding to at least one antigen that is present on an immune effector cell and wherein the hinge region polypeptide comprises a polypeptide selected from the group consisting of a human IgA hinge region polypeptide, a human IgG hinge region polypeptide, and a human IgE hinge region polypeptide; (b) an immunoglobulin heavy chain CH2 constant region polypeptide that is fused to the hinge region polypeptide, wherein said CH2 constant region polypeptide comprises a polypeptide selected from the group consisting of a human IgA CH2 constant region polypeptide, a human IgG CH2 constant region polypeptide, and a human IgE CH2 constant region polypeptide; (c) an immunoglobulin heavy chain CH3 constant region polypeptide that is fused to the CH2 constant region polypeptide, wherein said CH3 constant region polypeptide comprises a polypeptide selected from the group consisting of a human IgA CH3 constant region polypeptide, a human IgG CH3 constant region polypeptide, and a human IgE CH3 constant region polypeptide; and (d) a plasma membrane anchor domain polypeptide. In a further embodiment the membrane anchor domain polypeptide comprises a transmembrane domain polypeptide. In another further embodiment the membrane anchor domain polypeptide comprises a transmembrane domain polypeptide and a cytoplasmic tail polypeptide. In a still further embodiment the cytoplasmic tail polypeptide comprises an apoptosis signaling polypeptide sequence, which in a still further embodiment is derived from a receptor death domain polypeptide. In a further embodiment the death domain polypeptide comprises a polypeptide selected from an ITIM domain, an ITAM domain, FADD, TRADD, RAIDD, CD95 (FAS/Apo-1), TNFR1 or DR5. In another embodiment the apoptosis signaling polypeptide sequence comprises a polypeptide sequence derived from a caspase polypeptide that is caspase-3 or caspase-8. In another embodiment the plasma membrane anchor domain polypeptide comprises a glycosyl-phosphatidylinositol-linkage polypeptide sequence. In another embodiment the antigen that is present on an immune effector cell is CD2, CD28, CD30, CD40, CD50 (ICAM3), CD54 (ICAM1), CD80, CD86, B7-H1, CD134 (OX40), CD137 (41BB), CD152 (CTLA-4), CD153 (CD30 ligand), CD154 (CD40 ligand), ICOS, CD19, CD20, CD22, CD37, L6, CD3, CD4, CD25, CD8, CD11b, CD14, CD25, CD56 or CD69. In another embodiment the human IgG is human IgG1.

[0036] The invention provides, in another embodiment, a binding domain-immunoglobulin fusion protein, comprising (a) a binding domain polypeptide that is fused to an immunoglobulin hinge region polypeptide, wherein the binding domain polypeptide is capable of specifically binding to at least one antigen that is present on a cancer cell surface and wherein the hinge region polypeptide comprises a polypeptide selected from the group consisting of a human IgA hinge region polypeptide, a human IgG hinge region polypeptide, and a human IgE hinge region polypeptide; (b) an immunoglobulin heavy chain CH2 constant region polypeptide that is fused to the hinge region polypeptide, wherein the CH2 constant region polypeptide comprises a polypeptide that is a human IgA CH2 constant region polypeptide, a human IgG CH2 constant region polypeptide, or a human IgE CH2 constant region polypeptide; (c) an immunoglobulin heavy chain CH3 constant region polypeptide that is fused to the CH2 constant region polypeptide, wherein the CH3 constant region polypeptide comprises a polypeptide that is a human IgA CH3 constant region polypeptide, a human IgG CH3 constant region polypeptide, or a human IgE CH3 constant region polypeptide; and (d) a plasma membrane anchor domain polypeptide. In a further embodiment the membrane anchor domain polypeptide comprises a transmembrane domain polypeptide. In another embodiment the membrane anchor domain polypeptide comprises a transmembrane domain polypeptide and a cytoplasmic tail polypeptide. In another embodiment the membrane anchor domain polypeptide comprises a glycosyl-phosphatidylinositol-linkage polypeptide sequence. In another embodiment the human IgG is human IgG1.

[0037] In another embodiment the present invention provides a binding domain-immunoglobulin fusion protein, comprising (a) a binding domain polypeptide that is fused to an immunoglobulin hinge region polypeptide, wherein said hinge region polypeptide comprises a wild-type human IgA hinge region polypeptide; (b) an immunoglobulin heavy chain CH2 constant region polypeptide that is fused to the hinge region polypeptide, wherein said CH2 constant region polypeptide comprises a human IgA CH2 constant region polypeptide; and (c) an immunoglobulin heavy chain CH3 constant region polypeptide that is fused to the CH2 constant region polypeptide, wherein the CH3 constant region polypeptide comprises a polypeptide that is (i) a wild-type human IgA CH3 constant region polypeptide or (ii) a mutated human IgA CH3 constant region polypeptide that is incapable of associating with a J chain, wherein (1) the binding domain-immunoglobulin fusion protein is capable of at least one immunological activity selected from the group consisting of antibody dependent cell-mediated cytotoxicity and complement fixation, and (2) the binding domain polypeptide is capable of specifically binding to an antigen. In certain further embodiments the mutated human IgA CH3 constant region polypeptide that is incapable of associating with a J chain is (i) a polypeptide comprising an amino acid sequence as set forth in SEQ ID NOS: 296, 511AA or 295 and 510 (DNA) or (ii) a polypeptide comprising an amino acid sequence as set forth in SEQ ID NO: 303, 520 for amino acid sequence, and (302, 519 for DNA).

[0038] In certain other embodiments the present invention provides a binding domain-immunoglobulin fusion protein, comprising (a) a binding domain polypeptide that is fused to an immunoglobulin hinge region polypeptide; (b) an immunoglobulin heavy chain CH2 constant region polypeptide that is fused to the hinge region polypeptide, wherein the CH2 constant region polypeptide comprises a llama CH2 constant region polypeptide that is a llama IgG1 CH2 constant region polypeptide, a llama IgG2 CH2 constant region polypeptide or a llama IgG3 CH2 constant region polypeptide; and (c) an immunoglobulin heavy chain CH3 constant region polypeptide that is fused to the CH2 constant region polypeptide, wherein said CH3 constant region polypeptide comprises a llama CH3 constant region polypeptide that is selected from the group consisting of a llama IgG1 CH3 constant region polypeptide, a llama IgG2 CH3 constant region polypeptide and a llama IgG3 CH3 constant region polypeptide wherein (1) the binding domain-immunoglobulin fusion protein is capable of at least one immunological activity selected from the group consisting of antibody dependent cell-mediated cytotoxicity and induction fixation of complement, and (2) the binding domain polypeptide is capable of specifically binding to an antigen. In a further embodiment the immunoglobulin hinge region polypeptide, the llama CH2 constant region polypeptide and the llama CH3 constant region polypeptide comprise sequences derived from a llama IgG1 polypeptide and the fusion protein does not include a llama IgG1 CH1 domain. In certain embodiments the invention provides any of the above described binding domain-immunoglobulin fusion proteins wherein the hinge region polypeptide is mutated to contain a glycosylation site, which in certain further embodiments is an asparagine-linked glycosylation site, an O-linked glycosylation site, a C-mannosylation site, a glypiation site or a phosphoglycation site. In certain embodiments the invention provides any of the above described binding domain-immunoglobulin fusion proteins wherein the binding domain polypeptide comprises two or more binding domain polypeptide sequences wherein each of the binding domain polypeptide sequences is capable of specifically binding to an antigen.

[0039] The present invention also provides, in certain embodiments, a binding domain-immunoglobulin fusion protein, comprising (a) a binding domain polypeptide that is fused to an immunoglobulin hinge region polypeptide, wherein the hinge region polypeptide comprises an alternative hinge region polypeptide sequence; (b) an immunoglobulin heavy chain CH2 constant region polypeptide that is fused to the hinge region polypeptide; and (c) an immunoglobulin heavy chain CH3 constant region polypeptide that is fused to the CH2 constant region polypeptide, wherein: (1) the binding domain-immunoglobulin fusion protein is capable of at least one immunological activity selected from the group consisting of antibody dependent cell-mediated cytotoxicity and complement fixation, and (2) the binding domain polypeptide is capable of specifically binding to an antigen.

[0040] Turning to another embodiment there is provided a binding domain-immunoglobulin fusion protein, comprising (a) a binding domain polypeptide that is fused to an immunoglobulin hinge region polypeptide, wherein the binding domain polypeptide is capable of specifically binding to at least one antigen that is present on a cancer cell surface and wherein the hinge region polypeptide comprises an alternative hinge region polypeptide sequence; (b) an immunoglobulin heavy chain CH2 constant region polypeptide that is fused to the hinge region polypeptide, wherein said CH2 constant region polypeptide comprises a polypeptide selected from the group consisting of a human IgA CH2 constant region polypeptide, a human IgG CH2 constant region polypeptide, and a human IgE CH2 constant region polypeptide; (c) an immunoglobulin heavy chain CH3 constant region polypeptide that is fused to the CH2 constant region polypeptide, wherein the CH3 constant region polypeptide comprises a polypeptide that is a human IgA CH3 constant region polypeptide, a human IgG CH3 constant region polypeptide, or a human IgE CH3 constant region polypeptide; and (d) a plasma membrane anchor domain polypeptide. In certain further embodiments the alternative hinge region polypeptide sequence comprises a polypeptide sequence of at least ten continuous amino acids that are present in a sequence selected from SEQ ID NOS: 215, 216, 217, 218, 223, 224, 6, 15, 16. 35, 36, 37, 41, 207, 208, 223, 275, 276, 277, 296, 300, 350, 390, 391, 392, 396, 397, 398, 488, 582, 584, 586.

[0041] In certain embodiments the present invention provides an isolated polynucleotide encoding any one of the above described binding domain-immunoglobulin fusion proteins, and in other embodiments the invention provides a recombinant expression construct comprising any such polynucleotide that is operably linked to a promoter. In other embodiments there is provided a host cell transformed or transfected with any such recombinant expression construct. In a related embodiment there is provided a method of producing a binding domain-immunoglobulin fusion protein, comprising the steps of (a) culturing a host cell as just described under conditions that permit expression of the binding domain-immunoglobulin fusion protein; and (b) isolating the binding domain-immunoglobulin fusion protein from the host cell culture. In another embodiment there is provided a pharmaceutical composition comprising any one of the above described binding domain-immunoglobulin fusion proteins in combination with a physiologically acceptable carrier. In another embodiment the invention provides a pharmaceutical composition comprising an isolated polynucleotide encoding any one of the above described binding domain-immunoglobulin fusion proteins, in combination with a physiologically acceptable carrier. In another embodiment the invention provides a method of treating a subject having or suspected of having a malignant condition or a B-cell disorder, comprising administering to a patient a therapeutically effective amount of any of the pharmaceutical compositions just described. In certain further embodiments the malignant condition or B-cell disorder is a B-cell lymphoma or a disease characterized by autoantibody production, and in certain other further embodiments the malignant condition or B-cell disorder is rheumatoid arthritis, myasthenia gravis, Grave's disease, type I diabetes mellitus, multiple sclerosis or an autoimmune disease. In certain other embodiments the malignant condition is melanoma, carcinoma or sarcoma.

[0042] It is another aspect of the present invention to provide a binding domain-immunoglobulin fusion protein, comprising (a) a binding domain polypeptide that is fused to an immunoglobulin hinge region polypeptide, wherein said hinge region polypeptide is selected from the group consisting of (i) a mutated hinge region polypeptide that contains no cysteine residues and that is derived from a wild-type immunoglobulin hinge region polypeptide having one or more cysteine residues, (ii) a mutated hinge region polypeptide that contains one cysteine residue and that is derived from a wild-type immunoglobulin hinge region polypeptide having two or more cysteine residues, (iii) a wild-type human IgA hinge region polypeptide, (iv) a mutated human IgA hinge region polypeptide that contains no cysteine residues and that is derived from a wild-type human IgA region polypeptide, and (v) a mutated human IgA hinge region polypeptide that contains one cysteine residue and that is derived from a wild-type human IgA region polypeptide; (b) an immunoglobulin heavy chain CH2 constant region polypeptide that is fused to the hinge region polypeptide; and (c) an immunoglobulin heavy chain CH3 constant region polypeptide that is fused to the CH2 constant region polypeptide, wherein: (1) the binding domain-immunoglobulin fusion protein is capable of at least one immunological activity selected from the group consisting of antibody dependent cell-mediated cytotoxicity and complement fixation, and (2) the binding domain polypeptide is capable of specifically binding to an antigen. In one embodiment the immunoglobulin hinge region polypeptide is a mutated hinge region polypeptide and exhibits a reduced ability to dimerize, relative to a wild-type human immunoglobulin G hinge region polypeptide. In another embodiment the binding domain polypeptide comprises at least one immunoglobulin variable region polypeptide that is an immunoglobulin light chain variable region polypeptide or an immunoglobulin heavy chain variable region polypeptide. In a further embodiment the immunoglobulin variable region polypeptide is derived from a human immunoglobulin.

[0043] In another embodiment the binding domain Fv-immunoglobulin fusion protein binding domain polypeptide comprises (a) at least one immunoglobulin light chain variable region polypeptide; (b) at least one immunoglobulin heavy chain variable region polypeptide; and (c) at least one linker peptide that is fused to the polypeptide of (a) and to the polypeptide of (b). In a further embodiment the immunoglobulin light chain variable region and heavy chain variable region polypeptides are derived from human immunoglobulins.

[0044] In another embodiment at least one of the immunoglobulin heavy chain CH2 constant region polypeptide and the immunoglobulin heavy chain CH3 constant region polypeptide is derived from a human immunoglobulin heavy chain. In another embodiment the immunoglobulin heavy chain constant region CH2 and CH3 polypeptides are of an isotype selected from human IgG and human IgA. In another embodiment the antigen is selected from the group consisting of CD19, CD20, CD37, CD40 and L6. In certain further embodiments of the above described fusion protein, the linker polypeptide comprises at least one polypeptide having as an amino acid sequence Gly-Gly-Gly-Gly-Ser [SEQ ID NO: 39], and in certain other embodiments the linker polypeptide comprises at least three repeats of a polypeptide having as an amino acid sequence Gly-Gly-Gly-Gly-Ser [SEQ ID NO: 39]. In certain embodiments the immunoglobulin hinge region polypeptide comprises a human IgA hinge region polypeptide. In certain embodiments the binding domain polypeptide comprises a CD154 extracellular domain. In certain embodiments the binding domain polypeptide comprises a CD154 extracellular domain and at least one immunoglobulin variable region polypeptide.

[0045] In other embodiments the invention provides an isolated polynucleotide encoding any of the above described binding domain-immunoglobulin fusion proteins, and in related embodiments the invention provides a recombinant expression construct comprising such a polynucleotide, and in certain further embodiments the invention provides a host cell transformed or transfected with such a recombinant expression construct. In another embodiment the invention provides a method of producing a binding domain-immunoglobulin fusion protein, comprising the steps of (a) culturing the host cell as just described, under conditions that permit expression of the binding domain-immunoglobulin fusion protein; and (b) isolating the binding domain-immunoglobulin fusion protein from the host cell culture.

[0046] The present invention also provides in certain embodiments a pharmaceutical composition comprising a binding domain-immunoglobulin fusion protein as described above, in combination with a physiologically acceptable carrier. In another embodiment there is provided a method of treating a subject having or suspected of having a malignant condition or a B-cell disorder, comprising administering to a patient a therapeutically effective amount of an above described binding domain-immunoglobulin fusion protein. In certain further embodiments the malignant condition or B-cell disorder is a B-cell lymphoma or a disease characterized by autoantibody production, and in certain other further embodiments the malignant condition or B-cell disorder is rheumatoid arthritis, myasthenia gravis, Grave's disease, type I diabetes mellitus, multiple sclerosis or an autoimmune disease.

[0047] These and other aspects of the present invention will become apparent upon reference to the following detailed description and attached drawings. All references disclosed herein are hereby incorporated by reference in their entireties as if each was incorporated individually.

### BRIEF DESCRIPTION OF THE DRAWINGS

[0048] FIG. 1 shows DNA and deduced amino acid sequences (SEQ ID NO: 2) of 2H7scFv-Ig, a binding domain-immunoglobulin fusion protein capable of specifically binding CD20.

[0049] FIG. 2 shows production levels of 2H7 scFv-Ig by transfected, stable CHO lines and generation of a standard curve by binding of purified 2H7 scFv-Ig to CHO cells expressing CD20.

[0050] FIG. 3 shows SDS-PAGE analysis of multiple preparations of isolated 2H7scFv-Ig protein.

[0051] FIG. 4 shows complement fixation (FIG. 4A) and mediation of antibody-dependent cellular cytotoxicity (ADCC, FIG. 4B)) by 2H7scFv-Ig.

[0052] FIG. 5 shows the effect of simultaneous ligation of CD20 and CD40 on growth of normal B cells.

[0053] FIG. 6 shows the effect of simultaneous ligation of CD20 and CD40 on CD95 expression and induction of apoptosis in a B lymphoblastoid cell line.

[0054] FIG. 7 shows DNA and deduced amino acid sequences of 2H7scFv-CD154 L2 (FIG. 7A-7B, SEQ ID NOS: 21 and 33) and 2H7scFv-CD154 S4 (FIG. 7C-7D, SEQ ID NOS:22 and 34) binding domain-immunoglobulin fusion proteins capable of specifically binding CD20 and CD40.

[0055] FIG. 8 shows binding of 2H7scFv-CD154 binding domain-immunoglobulin fusion proteins to CD20+ CHO cells by flow immunocytofluorimetry.

[0056] FIG. 9 shows binding of Annexin V to B cell lines Ramos, BJAB, and T51 after binding of 2H7scFv-CD154 binding domain-immunoglobulin fusion protein to cells.

[0057] FIG. 10 shows effects on proliferation of B cell line T51 following binding of 2H7scFv-CD154 binding domain-immunoglobulin fusion protein.

[0058] FIG. 11 depicts schematic representations of the structures of 2H7ScFv-Ig fusion proteins referred to as CytoxB or CytoxB derivatives: CytoxB-MHWTG1C (2H7 ScFv, mutant hinge, wild-type human IgG1 Fc domain), CytoxB-MHMG1C (2H7 ScFv, mutant hinge, mutated human IgG1 Fc domain) and CytoxB-IgAHWTHG1C (2H7 ScFv, human IgA-derived hinge (SEQ ID NO: 41), wild-type human IgG1 Fc domain). Arrows indicate position numbers of amino acid residues believed to contribute to FcR binding and ADCC activity (heavy arrows), and to complement fixation (light arrows). Note absence of interchain disulfide bonds.

[0059] FIG. 12 shows SDS-PAGE analysis of isolated CytoxB and 2H7scFv-CD154 binding domain-immunoglobulin fusion proteins.

[0060] FIG. 13 shows antibody dependent cell-mediated cytotoxicity (ADCC) activity of CytoxB derivatives.

[0061] FIG. 14 shows complement dependent cytotoxicity (CDC) of CytoxB derivatives.

[0062] FIG. 15 shows serum half-life determinations of CytoxB-MHWTG1C in macaque blood samples.

[0063] FIG. 16 shows effects of CytoxB-MHWTG1C on levels of circulating CD40+ B cells in macaque blood samples.

[0064] FIG. 17 shows production levels of HD37 (CD19-specific) ScFv-Ig by transfected mammalian cell lines and generation of a standard curve by binding of purified HD37 ScFv-Ig to cells expressing CD19.

[0065] FIG. 18 shows production levels of L6 (carcinoma antigen) ScFv-Ig by transfected, stable CHO lines and generation of a standard curve by binding of purified L6 ScFv-Ig to cells expressing L6 antigen.

[0066] FIG. 19 shows ADCC activity of binding domain-immunoglobulin fusion proteins 2H7 ScFv-Ig, HD37 ScFv-Ig and G28-1 (CD37-specific) ScFv-Ig.

[0067] FIG. 20 shows ADCC activity of L6 ScFv-Ig fusion proteins.

[0068] FIG. 21 shows SDS-PAGE analysis of L6 ScFv-Ig and 2H7 ScFv-Ig fusion proteins.

[0069] FIG. 22 shows SDS-PAGE analysis of G28-1 ScFv-Ig and HD37 ScFv-Ig fusion proteins.

[0070] FIG. 23 presents a sequence alignment of immunoglobulin hinge, CH2 and CH3 domains of human IgG1 (SEQ ID NO: 428) with the hinge, CH2 and CH3 domains of llama IgG1 (SEQ ID NO: 430), IgG2 (SEQ ID NO: 432), and IgG3 (SEQ ID NO: 434).

[0071] FIG. 24 illustrates migration of purified 2H7 scFv llama IgG fusion proteins in a 10% SDS polyacrylamide gel. Purified fusion proteins (5 .mu.g per sample) were prepared in non-reducing sample buffer (lanes 2-5) and in reducing sample buffer (lanes 6-9). Lane 1: molecular weight markers (non-reduced); lanes 2 and 6: 2H7 scFv-llama IgG1 (DNA sequence is set forth in SEQ ID NO: 452; amino acid sequence is set forth in SEQ ID NO: 453); Lanes 3 and 7: 2H7 scFv-llama IgG2 (DNA sequence is set forth in SEQ ID NO: 454; amino acid sequence is set forth in SEQ ID NO: 455); lanes 4 and 8: 2H7 scFv-llama IgG3 (DNA sequence is set forth in SEQ ID NO: 456; amino acid sequence is set forth in SEQ ID NO: 457); and Lanes 5 and 9: Rituximab (chimeric anti-CD20 antibody (human IgG1 constant region)).

[0072] FIG. 25 shows binding of 2H7 scFv-llama IgG1 (DNA sequence is set forth in SEQ ID NO: 452; amino acid sequence is set forth in SEQ ID NO: 453), 2H7 scFv-llama IgG2 (DNA sequence is set forth in SEQ ID NO: 454; amino acid sequence is set forth in SEQ ID NO: 455), and 2H7 scFv-llama IgG3 (DNA sequence is set forth in SEQ ID NO: 456; amino acid sequence is set forth in SEQ ID NO: 457) to CD20+ CHO cells detected by flow immunocytofluorimetry.

[0073] FIG. 26 depicts CDC activity of 2H7 scFv llama IgG fusion proteins, 2H7 scFv-llama IgG1 (DNA sequence is set forth in SEQ ID NO: 452; amino acid sequence is set forth in SEQ ID NO: 453), 2H7 scFv-llama IgG2 (DNA sequence is set forth in SEQ ID NO: 454; amino acid sequence is set forth in SEQ ID NO: 455), and 2H7 scFv-llama IgG3 (SEQ ID NO: DNA sequence is set forth in SEQ ID NO: 454; amino acid sequence is set forth in SEQ ID NO: 455), and 2H7 scFv human IgG1 (2H7 scFv IgG WTH WTCH2CH3) (DNA sequence is set forth in SEQ ID NO: 456; amino acid sequence is set forth in SEQ ID NO: 457) against BJAB cells in the presence of rabbit complement. Rituximab was included as a positive control.

[0074] FIG. 27 shows ADCC activity of 2H7 scFv llama IgG fusion proteins, 2H7 scFv-llama IgG1 (DNA sequence is set forth in SEQ ID NO: 452; amino acid sequence is set forth in SEQ ID NO: 453), 2H7 scFv-llama IgG2 (SEQ ID NO: DNA sequence is set forth in SEQ ID NO: 454; amino acid sequence is set forth in SEQ ID NO: 455), and 2H7 scFv-llama IgG3 (DNA sequence is set forth in SEQ ID NO: 456; amino acid sequence is set forth in SEQ ID NO: 457). Effector cells (human PBMC) were combined with target cells (BJAB cells) at three different ratios, 1:25, 1:50, and 1:100. Rituximab was included as a positive control. Each data point represents three separate measurements.

[0075] FIG. 28 shows ADCC activity of 2H7 scFv llama IgG fusion proteins, 2H7 scFv-llama IgG1 (DNA sequence is set forth in SEQ ID NO: 452; amino acid sequence is set forth in SEQ ID NO: 453), 2H7 scFv-llama IgG2 (DNA sequence is set forth in SEQ ID NO: 454; amino acid sequence is set forth in SEQ ID NO: 455), and 2H7 scFv-llama IgG3 (DNA sequence is set forth in SEQ ID NO: 456; amino acid sequence is set forth in SEQ ID NO: 457). Effector cells (llama PBMC) were combined with target cells (BJAB cells) at three different ratios, 1:25, 1:50, and 1:100. Rituximab was included as a positive control. Each data point represents three separate measurements.

[0076] FIG. 29 depicts CDC activity of Reh cells (acute lymphocytic leukemia) expressing scFv-Ig fusion proteins on the cell surface. Reh cells were transfected with constructs encoding scFv antibodies specific for human costimulatory molecules, CD152, CD28, CD40, and CD20, fused to human IgG1 wild-type hinge-CH2-CH3, which was fused to human CD80 transmembrane and cytoplasmic tail domains. CDC activity was measured in the presence and absence of rabbit complement (plus C′ and no C′, respectively). The data represent the average of duplicate samples. Reh anti-hCD152 scFvIg: Reh cells transfected with polynucleotide 10A8 scFv IgG MTH (SSS) MT CH2CH3 (SEQ ID NOs: 270 and 485); Reh anti-hCD28scFvIg: 2E12 scFv IgG MTH (SSS) MT CH2CH3 (SEQ ID NOs: 268 and 483); Reh anti-hCD40scFvIg: 4.2.220 scFv IgG MTH (SSS) MT CH2CH3 (SEQ ID NOs: 266 and 481); and Reh anti-hCD20scFvIg: 2H7 scFv IgG MTH (SSS) MT CH2CH3-CD80.

[0077] FIG. 30 presents ADCC activity of Reh cells that were transfected with constructs encoding scFv antibodies specific for human costimulatory molecules, CD152, CD28, CD40, and CD20, as described for FIG. 29, and for murine CD3, fused to human mutant IgG1 hinge and mutant CH2 and wild type CH3 (Reh anti-mCD3scFv designating Reh cells transfected with polynucleotide 500A2 scFv IgG MTH (SSS) MTCH2WTCH3 SEQ ID NO: 272 and 487)), which was fused to human CD80 transmembrane and cytoplasmic tail domains. The data represent the average of quadruplicate samples.

[0078] FIG. 31 lists immunoglobulin constant region constructs that were used in experiments illustrated in subsequent figures.

[0079] FIG. 32 depicts CDC activity of CTLA-4 Ig fusion proteins, CTLA-4 IgG WTH (CCC) WTCH2CH3 (SEQ ID NO: 307) (2 μg/ml) and CTLA-4 IgG MTH MTCH2WTCH3 (SEQ ID NO: 316 and 530) (2 μg/ml), in the presence and absence of rabbit complement (plus C′ and no C′, respectively). The target cells were Reh cells and Reh cells transfected with CD80 (Reh CD80.10).

[0080] FIG. 33 shows ADCC activity of CTLA-4 Ig fusion proteins, CTLA-4 IgG WTH (CCC) WTCH2CH3 (SEQ ID NO: 307) (2 μg/ml) and CTLA-4 IgG MTH MTCH2WTCH3 (SEQ ID NO: 316 and 530) (2 μg/ml). Effector cells, human PBMC, were added to target cells, Reh or Reh CD80.1, at the ratios indicated. FIG. 33A presents the level of natural killing in Reh CD80.1 cells in the absence of any Ig fusion protein.

[0081] FIG. 33B presents ADCC mediated by CTLA-4 IgG MTH MTCH2WTCH3, and FIG. 33C presents ADCC mediated by CTLA-4 IgG WTH (CCC) WTCH2CH3. Each data point represents the average percent specific killing measured in four sample wells.

[0082] FIG. 34 illustrates binding of 2H7 (anti-CD20) scFv Ig fusion proteins to (CD20+) CHO cells by flow immunocytofluorimetry.

[0083] FIG. 35 presents an immunoblot of 2H7 scFv IgG and IgA fusion proteins. COS cells were transiently transfected with various 2H7 scFv Ig fusion protein constructs. The expressed polypeptides were immune precipitated with protein A, separated in a non-reducing SDS polyacrylamide gel, and then transferred to a polyvinyl fluoride membrane. Proteins were detected using an anti-human IgG (Fc specific) horseradish peroxidase conjugate. Lane 1: vector only; lane 2: 2H7 scFv IgG WTH (CCC) WTCH2CH3 (SEQ ID NO: 15 and 240); lane 3: 2H7 scFv IgG MTH (CSS) WTCH2CH3 (SEQ ID NO: 670); lane 4: 2H7 scFv IgG MTH (SCS) WTCH2CH3 (SEQ ID NO: 671); lane 5: 2H7 scFv IgAH IgG WTCH2CH3 (SEQ ID NO: 18 and 284); and lane 6: 2H7 scFv IgG MTH (SSS) WTCH2CH3 (SEQ ID NO: 17, 274 and 489).

[0084] FIG. 36 illustrates binding of 2H7 scFv IgAH IgACH2CH3 polypeptide (SEQ ID NO: 286 and 502) and 2H7 scFv IgAH IgAT4 (SEQ ID NO: 299) to (CD20+) CHO cells by flow immunocytofluorimetry. The source of the polypeptides was culture supernatants from transiently transfected COS cells. COS cells transfected with a plasmid comprising a sequence encoding 2H7 scFv IgAH IgACH2CH3 were co-transfected with a plasmid containing nucleotide sequence encoding human J chain.

[0085] FIG. 37 illustrates ADCC activity of anti-CD20 (2H7) scFv Ig fusion proteins against BJAB target cells using whole blood as the source of effector cells. Purified 2H7 scFv Ig fusion proteins were titrated and combined with ⁵¹Cr-labeled BJAB cells (5×10⁴) and whole blood (1:4 final dilution). Each data point represents the average percent specific killing measured in four sample wells.

[0086] FIG. 38 demonstrates ADCC activity of 2H7 scFv Ig fusion proteins (5 μg/ml) against ⁵¹Cr-labeled BJAB cells at 0.25, 0.125, and 0.625 dilutions of whole blood. Each data point represents the average percent specific killing measured in four sample wells.

[0087] FIG. 39 shows a comparison of ADCC activity of 2H7 scFv IgG MTH (SSS) WTCH2CH3 (5 μg/ml) and 2H7 scFv IgAH IgACH2CH3 (5 μg/ml) when human PBMC are the source of effector cells (FIG. 39A) and when human whole blood is the source of effector cells (FIG. 39B).

[0088] FIG. 40 presents an immunoblot of 2H7 scFv IgG fusion proteins. COS cells were transiently transfected with various 2H7 scFv Ig fusion protein constructs. Culture supernatants containing the expressed polypeptides were separated in a non-reducing SDS polyacrylamide gel, and then were transferred to a polyvinyl fluoride membrane. Proteins were detected using an anti-human IgG (Fc specific) horseradish peroxidase conjugate. Lanes 1-5: purified 2H7 scFv IgG MTH (SSS) WTCH2CH3 at 40 ng, 20 ng, 10 ng/5 ng, and 2.5 ng per lane, respectively. Culture supernatants were separated in lanes 6-9. Lane 6: 2H7 scFv IgG WTH (CCC) WTCH2CH3; lane 7: 2H7 scFv IgG MTH (CSS) WTCH2CH3; lane 8: 2H7 scFv IgG MTH (SCS) WTCH2CH3; and lane 9: 2H7 scFv VHSER11 IgG MTH (SSS) WTCH2CH3. The molecular weight (kDal) of marker proteins is indicated on the left side of the immunoblot.

[0089] FIG. 41A illustrates cell surface expression of 1D8 (anti-murine 4-1BB) scFv IgG WTH WTCH2CH3-CD80 fusion protein on K1735 melanoma cells by flow immunofluorimetry. The scFv fusion protein was detected with phycoerythrin-conjugated F(ab′)₂ goat anti-human IgG. FIG. 41B depicts growth of tumors in naïve C3H mice transplanted by subcutaneous injection with wild type K1735 melanoma cells (K1735-WT) or with K1735 cells transfected with 1D8 scFv IgG WTH WTCH2CH3-CD80 (K1735-1D8). Tumor growth was monitored by measuring the size of the tumor. FIG. 41C demonstrates the kinetics of tumor growth in naïve C3H mice injected intraperitoneally with monoclonal antibodies to remove CD8+, CD4+, or both CD4+ and CD8+ T cells prior to transplantation of the animals with K1735-1D8 cells.

[0090] FIG. 42 demonstrates therapy of established K1735-WT tumors using K1735-1D8 as an immunogen. Six days after mice were transplanted with K1735-WT tumors, one group (five animals) was injected subcutaneously with K1735-1D8 cells (open circles) or irradiated K1735-WT cells (solid squares) on the contralateral side. A control group of mice received PBS (open squares). Treatments were repeated on the days indicated by the arrows.

[0091] FIG. 43 shows the growth of tumors in animals that were injected subcutaneously with 2×10⁶ K1735-WT cells (solid squares) and the growth of tumors in animals that were injected subcutaneously with 2×10⁶ K1735-WT cells plus 2×10⁵ K1735-1D8 cells (open triangles).

[0092] FIG. 44 presents a flow cytometry analysis of Ag104 murine sarcoma tumor cells transfected with 1D8 scFv IgG WTH WTCH2CH3-CD80 isolated after repeated rounds of panning against anti-human IgG. Transfected cells expressing 1D8 scFv IgG WTH WTCH2CH3-CD80 were detected with fluoroisothiocyanate (FITC)-conjugated goat anti-human IgG (depicted in black). Untransfected cells are shown in gray.

[0093] FIG. 45 illustrates migration of various 2H7 scFv Ig fusion proteins in a 10% SDS-PAGE gel. 2H7 was the anti-CD20 scFv and [220] was the anti-CD40 scFv. Lane 1: Bio-Rad prestained molecular weight standards; lane 2: anti-CD20 scFv IgG MTH (SSS) MTCH2WTCH3; lane 3: anti-CD20 scFv IgG MTH (SSS) WTCH2CH3; lane 4: 2H7 scFv IgAH IgG WTCH2CH3; lane 5: anti-CD20-anti-CD40 scFv IgG MTH (SSS) MTCH2WTCH3; lane 6: Rituximab; lane 7: Novex Multimark® molecular weight standards.

[0094] FIG. 46 illustrates effector function as measured in an ADCC assay of 2H7 Ig fusion proteins that contain a mutant CH2 domain or wild type CH2 domain. The percent specific killing of BJAB target cells in the presence of human PBMC effector cells by 2H7 scFv IgG MTH (SSS) MTCH2WTCH3 (diamonds) was compared to 2H7 scFv IgG MTH (SSS) WTCH2CH3 (squares) and 2H7 scFv IgAH IgG WTCH2CH3 (triangles) and Rituximab (circles).

[0095] FIG. 47 shows cell surface expression of an anti-human CD3 scFv IgG WTH WTCH2CH3-CD80 (SEQ ID NO: 560) fusion protein on Reh cells (FIG. 47A) and T51 lymphoblastoid cells (FIG. 47B) by flow immunocytofluorimetry.

[0096] FIG. 48 presents the percent specific killing of untransfected Reh and T51 cells and the percent specific killing of Reh cells (Reh anti-hCD3) (FIG. 48A) and T51 cells (T51 anti-hCD3) (FIG. 48B) that were transfected with a construct encoding scFv antibodies specific for human CD3, fused to human IgG1 wild-type hinge-CH2-CH3, which was fused to human CD80 transmembrane and cytoplasmic tail domains (anti-human CD3 scFv IgG WTH WTCH2CH3-CD80 (SEQ ID NO: 560). Human PBMC (effector cells) were combined with BJAB target cells at the ratios indicated.

[0097] FIG. 49 illustrates binding of 5B9, a murine anti-human CD137 (4-1BB) monoclonal antibody, and a 5B9 scFv IgG fusion protein (5B9 scFv IgG MTH (SSS) WTCH2CH3 (SEQ ID NO: 363)) to stimulated human PBMC. Binding of the 5B9 scFv IgG fusion protein was detected by flow immunocytofluorimetry using FITC conjugated goat anti-human IgG. Binding of the 5B9 monoclonal antibody was detected with FITC conjugated goat anti-mouse IgG.

### DETAILED DESCRIPTION

[0098] The present invention is directed to binding domain-immunoglobulin fusion proteins and to related compositions and methods, which will be useful in immunotherapeutic and immunodiagnostic applications, and which offer certain advantages over antigen-specific polypeptides of the prior art. The fusion proteins of the present invention are preferably single polypeptide chains that comprise, in pertinent part, the following fused domains: a binding domain polypeptide, an immunoglobulin hinge region polypeptide, an immunoglobulin heavy chain CH2 constant region polypeptide, and an immunoglobulin heavy chain CH3 constant region polypeptide. According to certain preferred embodiments the fusion proteins of the present invention further comprise a plasma membrane anchor domain. According to certain other preferred embodiments the fusion proteins of the present invention further comprise an immunoglobulin heavy chain CH4 constant region polypeptide. In particularly preferred embodiments, the polypeptide domains of which the binding domain-immunoglobulin fusion protein is comprised are, or are derived from, polypeptides that are the products of human gene sequences, but the invention need not be so limited and may in fact relate to binding domain-immunoglobulin fusion proteins as provided herein that are derived from any natural or artificial source, including genetically engineered and/or mutated polypeptides.

[0099] The present invention relates in part to the surprising observation that the binding domain-immunoglobulin fusion proteins described herein are capable of immunological activity. More specifically, these proteins retain the ability to participate in well known immunological effector activities including antibody dependent cell mediated cytotoxicity (ADCC, e.g., subsequent to antigen binding on a cell surface, engagement and induction of cytotoxic effector cells bearing appropriate Fc receptors, such as natural killer (NK) cells bearing FcRγIII, under appropriate conditions;) and/or complement fixation in complement dependent cytotoxicity (CDC, e.g., subsequent to antigen binding on a cell surface, recruitment and activation of cytolytic proteins that are components of the blood complement cascade; for reviews of ADCC and CDC see, e.g., Carter, 2001 Nat. Rev. Canc. 1:118; Sulica et al., 2001 Int. Rev. Immunol. 20:371; Maloney et al., 2002 Semin. Oncol. 29:2; Sondel et al., 2001; Maloney 2001 Anticanc. Drugs 12 Suppl.2:1-4; IgA activation of complement by the alternative pathway is described, for example, in Schneiderman et al., 1990 J. Immunol. 145:233), despite having structures that would not be expected to be capable of promoting such effector activities. As described in greater detail below, ADCC and CDC are unexpected functions for fusion proteins comprising immunoglobulin heavy chain regions and having the structures described herein, and in particular for immunoglobulin fusion proteins comprising immunoglobulin hinge region polypeptides that are compromised in their ability to form interchain, homodimeric disulfide bonds.

[0100] Another advantage afforded by the present invention is a binding domain-immunoglobulin fusion polypeptide that can be produced in substantial quantities that are typically greater than those routinely attained with single-chain antibody constructs of the prior art. In preferred embodiments, the binding domain-immunoglobulin fusion polypeptides of the present invention are recombinantly expressed in mammalian expression systems, which offer the advantage of providing polypeptides that are stable in vivo (e.g., under physiological conditions). According to non-limiting theory, such stability may derive in part from posttranslational modifications, and specifically glycosylation, of the fusion proteins. Production of the present binding domain-immunoglobulin fusion proteins via recombinant mammalian expression has been attained in static cell cultures at a level of greater than 50 mg protein per liter culture supernatant and has been routinely observed in such cultures at 10-50 mg/l, such that preferably at least 10-50 mg/l may be produced under static culture conditions; also contemplated are enhanced production of the fusion proteins using art-accepted scale-up methodologies such as “fed batch” (i.e., non-static) production, where yields of at least 5-500 mg/l, and in some instances at least 0.5-1 gm/l, depending on the particular protein product, are obtained.

[0101] A binding domain polypeptide according to the present invention may be any polypeptide that possesses the ability to specifically recognize and bind to a cognate biological molecule or complex of more than one molecule or assembly or aggregate, whether stable or transient, of such a molecule, which includes a protein, polypeptide, peptide, amino acid, or derivative thereof; a lipid, fatty acid or the like, or derivative thereof; a carbohydrate, saccharide or the like or derivative thereof, a nucleic acid, nucleotide, nucleoside, purine, pyrimidine or related molecule, or derivative thereof, or the like; or any combination thereof such as, for example, a glycoprotein, a glycopeptide, a glycolipid, a lipoprotein, a proteolipid; or any other biological molecule that may be present in a biological sample. Biological samples may be provided by obtaining a blood sample, biopsy specimen, tissue explant, organ culture, biological fluid or any other tissue or cell preparation from a subject or a biological source. The subject or biological source may be a human or non-human animal, a primary cell culture or culture adapted cell line including but not limited to genetically engineered cell lines that may contain chromosomally integrated or episomal recombinant nucleic acid sequences, immortalized or immortalizable cell lines, somatic cell hybrid cell lines, differentiated or differentiatable cell lines, transformed cell lines and the like. In certain preferred embodiments of the invention, the subject or biological source may be suspected of having or being at risk for having a malignant condition or a B-cell disorder as provided herein, which in certain further preferred embodiments may be an autoimmune disease, and in certain other preferred embodiments of the invention the subject or biological source may be known to be free of a risk or presence of such disease.

[0102] A binding domain polypeptide may therefore be any naturally occurring or recombinantly produced binding partner for a cognate biological molecule as provided herein that is a target structure of interest, herein referred to as an “antigen” but intended according to the present disclosure to encompass any target biological molecule to which it is desirable to have the subject invention fusion protein specifically bind. Binding domain-immunoglobulin fusion proteins are defined to be “immunospecific” or capable of specifically binding if they bind a desired target molecule such as an antigen as provided herein, with a Kₐ of greater than or equal to about 10⁴ M⁻¹, preferably of greater than or equal to about 10⁵ M⁻¹, more preferably of greater than or equal to about 10⁶ M⁻¹ and still more preferably of greater than or equal to about 10⁷ M⁻¹. Affinities of binding domain-immunoglobulin fusion proteins according to the present invention can be readily determined using conventional techniques, for example those described by Scatchard et al., Ann. N.Y. Acad. Sci. 51:660 (1949). Such determination of fusion protein binding to target antigens of interest can also be performed using any of a number of known methods for identifying and obtaining proteins that specifically interact with other proteins or polypeptides, for example, a yeast two-hybrid screening system such as that described in U.S. Pat. No. 5,283,173 and U.S. Pat. No. 5,468,614, or the equivalent.

[0103] Preferred embodiments of the subject invention binding domain-immunoglobulin fusion protein comprise binding domains that include at least one immunoglobulin variable region polypeptide, such as all or a portion or fragment of a heavy chain or a light chain V-region, provided it is capable of specifically binding an antigen or other desired target structure of interest as described herein. In other preferred embodiments the binding domain comprises a single chain immunoglobulin-derived Fv product, which may include all or a portion of at least one immunoglobulin light chain V-region and all or a portion of at least one immunoglobulin heavy chain V-region, and which further comprises a linker fused to the V-regions; preparation and testing such constructs are described in greater detail herein and are well known in the art. As described herein and as also known in the art, immunoglobulins comprise products of a gene family the members of which exhibit a high degree of sequence conservation, such that amino acid sequences of two or more immunoglobulins or immunoglobulin domains or regions or portions thereof (e.g., VH domains, VL domains, hinge regions, CH2 constant regions, CH3 constant regions) can be aligned and analyzed to identify portions of such sequences that correspond to one another, for instance, by exhibiting pronounced sequence homology. Determination of sequence homology may be readily determined with any of a number of sequence alignment and analysis tools, including computer algorithms well known to those of ordinary skill in the art, such as Align or the BLAST algorithm (Altschul, J. Mol. Biol. 219:555-565, 1991; Henikoff and Henikoff, Proc. Natl. Acad. Sci. USA 89:10915-10919, 1992), which is available at the NCBI website (http://www/ncbi.nlm.nih.gov/cgi-bin/BLAST). Default parameters may be used.

[0104] Portions of a particular immunoglobulin reference sequence and of any one or more additional immunoglobulin sequences of interest that may be compared to the reference sequence are regarded as “corresponding” sequences, regions, fragments or the like, based on the convention for numbering immunoglobulin amino acid positions according to Kabat, Sequences of Proteins of Immunological Interest, (5^{th} ed. Bethesda, MD: Public Health Service, National Institutes of Health (1991)). For example, according to this convention, the immunoglobulin family to which an immunoglobulin sequence of interest belongs is determined based on conservation of variable region polypeptide sequence invariant amino acid residues, to identify a particular numbering system for the immunoglobulin family, and the sequence(s) of interest can then be aligned to assign sequence position numbers to the individual amino acids which comprise such sequence(s). Preferably at least 70%, more preferably at least 80%-85% or 86%-89%, and still more preferably at least 90%, 92%, 94%, 96%, 98% or 99% of the amino acids in a given amino acid sequence of at least 1000, more preferably 700-950, more preferably 350-700, still more preferably 100-350, still more preferably 80-100, 70-80, 60-70, 50-60, 40-50 or 30-40 consecutive amino acids of a sequence, are identical to the amino acids located at corresponding positions in a reference sequence such as those disclosed by Kabat (1991) or in a similar compendium of related immunoglobulin sequences, such as may be generated from public databases (e.g., Genbank, SwissProt, etc.) using sequence alignment tools as described above. In certain preferred embodiments, an immunoglobulin sequence of interest or a region, portion, derivative or fragment thereof is greater than 95% identical to a corresponding reference sequence, and in certain preferred embodiments such a sequence of interest may differ from a corresponding reference at no more than 1, 2, 3, 4, 5, 6, 7, 8, 9 or 10 amino acid positions.

[0105] For example, in certain embodiments the present invention is directed to a binding domain-immunoglobulin fusion protein comprising in pertinent part a human immunoglobulin heavy chain variable region polypeptide comprising a mutation at an amino acid at a location corresponding to amino acid position 11 in the VH domain, or amino acid position 155 in SEQ ID NO: 11, position 158 in SEQ ID NO: 12, position 154 in SEQ ID NO:13, or position 159 in SEQ ID NO 14, or amino acid position 11 in the VH domain polypeptides listed in SEQ ID NOS: 341, 354, 465, 471, 477, 548 which comprises a murine VH-derived sequence, and regarding which it is noteworthy that at a relatively limited number of immunoglobulin VH sequence positions, including position 11, amino acid conservation is observed in the overwhelming majority of VH sequences analyzed across mammalian species lines (e.g., Leu11, Val37, Gly44, Leu45, Trp47; Nguyen et al., 1998J. Mol. Biol 275:413). These amino acid side chains are located at the surface of the variable domain (V_{H}), where they may contact residues of the C_{H}1 (Leu11) and the V_{L} domains (Val37, Gly44, Leu45, and Trp47) and may, in the absence of light chains, contribute to stability and solubility of the protein (see, e.g., Chothia et al., 1985 J. Mol. Biol. 186:651; Muyldermans et al., 1994 Prot. Engineer. 7:1129; Desmyter et al., 1996 Nat. Struct. Biol. 3:803; Davies et al., 1994 FEBS Lett. 339:285). As another example, by reference to immunoglobulin sequence compendia and databases such as those cited above, the relatedness of two or more immunoglobulin sequences to each other can readily and without undue experimentation be established in a manner that permits identification of the animal species of origin, the class and subclass (e.g., isotype) of a particular immunoglobulin or immunoglobulin region polypeptide sequence. Any immunoglobulin variable region polypeptide sequence, including VH and/or VL and/or single-chain variable region (sFv) sequences or other V region-derived sequences or the like, may be used as a binding domain. Preferred embodiments include immunoglobulin V region polypeptide sequences derived from monoclonal antibodies such as murine or other rodent antibodies, or monoclonal antibodies derived from other sources such as goat, rabbit, equine, bovine, camelid or other species, including transgenic animals, and also including human or humanized monoclonal antibodies. Non-limiting examples include variable region polypeptide sequences derived from mAb such as those described in greater detail in the Examples below, for instance, CD20-specific murine monoclonal antibodies (e.g., 2H7), mAb L6 (specific for a carbohydrate-defined epitope and available from American Type Culture Collection, Manassas, Va., as hybridoma HB8677), and mAb specific for CD28 (e.g., mAb 2E12), CD40, CD80, CD137 (e.g., mAb 5B9 or mAb 1D8 which recognizes the human homologue of CD137, 41BB) and CD152 (CTLA-4).

[0106] Other binding domain polypeptides may comprise any protein or portion thereof that retains the ability to specifically bind an antigen as provided herein, including non-immunoglobulins. Accordingly the invention contemplates fusion proteins comprising binding domain polypeptides that are derived from polypeptide ligands such as hormones, cytokines, chemokines, and the like; cell surface or soluble receptors for such polypeptide ligands; lectins; intercellular adhesion receptors such as specific leukocyte integrins, selectins, immunoglobulin gene superfamily members, intercellular adhesion molecules (ICAM-1, -2, -3) and the like; histocompatibility antigens; etc.

[0107] Examples of cell surface receptors that may provide a binding domain polypeptide, and that may also be selected as the target molecule or antigen to which a binding domain-Ig fusion protein of the present invention desirably binds, include the following, or the like: HER1 (e.g., GenBank Accession Nos. U48722, SEG_HEGFREXS, KO3193), HER2 (Yoshino et al., 1994 J. Immunol. 152:2393; Disis et al., 1994 Canc. Res. 54:16; see also, e.g., GenBank Acc. Nos. X03363, M17730, SEG_HUMHER20), HER3 (e.g., GenBank Acc. Nos. U29339, M34309), HER4 (Plowman et al., 1993 Nature 366:473; see also e.g., GenBank Acc. Nos. L07868, T64105), epidermal growth factor receptor (EGFR) (e.g., GenBank Acc. Nos. U48722, SEG_HEGFREXS, KO3193), vascular endothelial cell growth factor (e.g., GenBank No. M32977), vascular endothelial cell growth factor receptor (e.g., GenBank Acc. Nos. AF022375, 1680143, U48801, X62568), insulin-like growth factor-I (e.g., GenBank Acc. Nos. X00173, X56774, X56773, X06043, see also European Patent No. GB 2241703), insulin-like growth factor-II (e.g., GenBank Acc. Nos. X03562, X00910, SEG_HUMGFIA, SEG_HUMGFI2, M17863, M17862), transferrin receptor (Trowbridge and Omary, 1981 Proc. Nat. Acad. USA 78:3039; see also e.g., GenBank Acc. Nos. X01060, M11507), estrogen receptor (e.g., GenBank Acc. Nos. M38651, X03635, X99101, U47678, M12674), progesterone receptor (e.g., GenBank Acc. Nos. X51730, X69068, M15716), follicle stimulating hormone receptor (FSH-R) (e.g., GenBank Acc. Nos. Z34260, M65085), retinoic acid receptor (e.g., GenBank Acc. Nos. L12060, M60909, X77664, X57280, X07282, X06538), MUC-1 (Barnes et al., 1989 Proc. Nat. Acad. Sci. USA 86:7159; see also e.g., GenBank Acc. Nos. SEG_MUSMUCIO, M65132, M64928) NY-ESO-1 (e.g., GenBank Acc. Nos. AJ003149, U87459), NA 17-A (e.g., European Patent No. WO 96/40039), Melan-A/MART-1 (Kawakami et al., 1994 Proc. Nat. Acad. Sci. USA 91:3515; see also e.g., GenBank Acc. Nos. U06654, U06452), tyrosinase (Topalian et al., 1994 Proc. Nat. Acad. Sci. USA 91:9461; see also e.g., GenBank Acc. Nos. M26729, SEG_HUMTYR0, see also Weber et al., J. Clin. Invest (1998) 102:1258), Gp-100 (Kawakami et al., 1994 Proc. Nat. Acad. Sci. USA 91:3515; see also e.g., GenBank Acc. No. 573003, see also European Patent No. EP 668350; Adema et al., 1994 J. Biol. Chem. 269:20126), MAGE (van den Bruggen et al., 1991 Science 254:1643; see also, e.g., GenBank Acc. Nos. U93163, AF064589, U66083, D32077, D32076, D32075, U10694, U10693, U10691, U10690, U10689, U10688, U10687, U10686, U10685, L18877, U10340, U10339, L18920, U03735, M77481), BAGE (e.g., GenBank Acc. No. U19180, see also U.S. Pat. Nos. 5,683,886 and 5,571,711), GAGE (e.g., GenBank Acc. Nos. AF055475, AF055474, AF055473, U19147, U19146, U19145, U19144, U19143, U19142), any of the CTA class of receptors including in particular HOM-MEL-40 antigen encoded by the SSX2 gene (e.g., GenBank Acc. Nos. X86175, U90842, U90841, X86174), carcinoembyonic antigen (CEA, Gold and Freedman, 1985J. Exp. Med. 121:439; see also e.g., GenBank Acc. Nos. SEG_HUMCEA, M59710, M59255, M29540), and PyLT (e.g., GenBank Acc. Nos. J02289, J02038).

[0108] Additional cell surface receptors that may be sources of binding domain polypeptides or that may be cognate antigens include the following, or the like: CD2 (e.g., GenBank Acc. Nos. Y00023, SEG_HUMCD2, M16336, M16445, SEG_MUSCD2, M14362), 4-1BB (CDw137, Kwon et al., 1989 Proc. Nat. Acad. Sci. USA 86:1963, 4-1BB ligand (Goodwin et al., 1993 Eur. J. Immunol. 23:2361; Melero et al., 1998 Eur. J. Immunol. 3:116), CD5 (e.g., GenBank Acc. Nos. X78985, X89405), CD10 (e.g., GenBank Acc. Nos. M81591, X76732) CD27 (e.g., GenBank Acc. Nos. M63928, L24495, L08096), CD28 (June et al., 1990 Immunol. Today 11:211; see also, e.g., GenBank Acc. Nos. J02988, SEG_HUMCD28, M34563), CD152/CTLA-4 (e.g., GenBank Acc. Nos. L15006, X05719, SEG_HUMIGCTL), CD40 (e.g., GenBank Acc. Nos. M83312, SEG_MUSC040A0, Y10507, X67878, X96710, U15637, L07414), interferon-γ (IFN-γ; see, e.g., Farrar et al. 1993 Ann. Rev. Immunol. 11:571 and references cited therein, Gray et al. 1982 Nature 295:503, Rinderknecht et al. 1984 J. Biol. Chem. 259:6790, DeGrado et al. 1982 Nature 300:379), interleukin-4 (IL-4; see, e.g., 53^{rd} Forum in Immunology, 1993 Research in Immunol. 144:553-643; Banchereau et al., 1994 in The Cytokine Handbook, 2^{nd} ed., A. Thomson, ed., Academic Press, NY, p. 99; Keegan et al., 1994 J Leukocyt. Biol. 55:272, and references cited therein), interleukin-17 (IL-17) (e.g., GenBank Acc. Nos. U32659, U43088) and interleukin-17 receptor (IL-17R) (e.g., GenBank Acc. Nos. U31993, U58917). Notwithstanding the foregoing, the present invention expressly does not encompass any immunoglobulin fusion protein that is disclosed in U.S. Pat. No. 5,807,734, U.S. Pat. No. 5,795,572 or U.S. Pat. No. 5,807,734.

[0109] Additional cell surface receptors that may be sources of binding domain polypeptides or that may be cognate antigens include the following, or the like: CD59 (e.g., GenBank Acc. Nos. SEG_HUMCD590, M95708, M34671), CD48 (e.g., GenBank Acc. Nos. M59904), CD58/LFA-3 (e.g., GenBank Acc. No. A25933, Y00636, E12817; see also JP 1997075090-A), CD72 (e.g., GenBank Acc. Nos. AA311036, 540777, L35772), CD70 (e.g., GenBank Acc. Nos. Y13636, S69339), CD80/B7.1 (Freeman et al., 1989 J. Immunol. 43:2714; Freeman et al., 1991 J. Exp. Med. 174:625; see also e.g., GenBank Acc. Nos. U33208, 1683379), CD86/B7.2 (Freeman et al., 1993 J. Exp. Med. 178:2185, Boriello et al., 1995 J. Immunol. 155:5490; see also, e.g., GenBank Acc. Nos. AF099105, SEG_MMB72G, U39466, U04343, SEG_HSB725, L25606, L25259), B7-H1/B7-DC (e.g., Genbank Acc. Nos. NM_{—}014143, AF177937, AF317088; Dong et al., 2002 Nat. Med. June 24 [epub ahead of print], PMID 12091876; Tseng et al., 2001 J. Exp. Med. 193:839; Tamura et al., 2001 Blood 97:1809; Dong et al., 1999 Nat. Med. 5:1365), CD40 ligand (e.g., GenBank Acc. Nos. SEG_HUMCD40L, X67878, X65453, L07414), IL-17 (e.g., GenBank Acc. Nos. U32659, U43088), CD43 (e.g., GenBank Acc. Nos. X52075, J04536), ICOS (e.g., Genbank Acc. No. AH011568), CD3 (e.g., Genbank Acc. Nos. NM_{—}000073 (gamma subunit), NM_{—}000733 (epsilon subunit), X73617 (delta subunit)), CD4 (e.g., Genbank Acc. No. NM_{—}000616), CD25 (e.g., Genbank Acc. No. NM_{—}000417), CD8 (e.g., Genbank Acc. No. M12828), CD11b (e.g., Genbank Acc. No. J03925), CD14 (e.g., Genbank Acc. No. XM_{—}039364), CD56 (e.g., Genbank Acc. No. U63041), CD69 (e.g., Genbank Acc. No. NM_{—}001781) and VLA-4 (α₄β₇) (e.g., GenBank Acc. Nos. L12002, X16983, L20788, U97031, L24913, M68892, M95632). The following cell surface receptors are typically associated with B cells: CD19 (e.g., GenBank Acc. Nos. SEG_HUMCD19W0, M84371, SEG_MUSCD19W, M62542), CD20 (e.g., GenBank Acc. Nos. SEG_HUMCD20, M62541), CD22 (e.g., GenBank Acc. Nos. 1680629, Y10210, X59350, U62631, X52782, L16928), CD30 (e.g., Genbank Acc. Nos. M83554, D86042), CD153 (CD30 ligand, e.g., GenBank Acc. Nos. L09753, M83554), CD37 (e.g., GenBank Acc. Nos. SEG_MMCD37X, X14046, X53517), CD50 (ICAM-3, e.g., GenBank Acc. No. NM_{—}002162), CD106 (VCAM-1) (e.g., GenBank Acc. Nos. X53051, X67783, SEG_MMVCAM1C, see also U.S. Pat. No. 5,596,090), CD54 (ICAM-1) (e.g., GenBank Acc. Nos. X84737, 582847, X06990, J03132, SEG_MUSICAM0), interleukin-12 (see, e.g., Reiter et al, 1993 Crit. Rev. Immunol. 13:1, and references cited therein), CD134 (OX40, e.g., GenBank Acc. No. AJ277151), CD137 (41BB, e.g., GenBank Acc. No. L12964, NM_{—}001561), CD83 (e.g., GenBank Acc. Nos. AF001036, AL021918), DEC-205 (e.g., GenBank Acc. Nos. AF011333, U19271).

[0110] Binding domain-immunoglobulin fusion proteins of the present invention comprise a binding domain polypeptide that, according to certain particularly preferred embodiments, is capable of specifically binding at least one antigen that is present on an immune effector cell. According to non-limiting theory, such binding domain-Ig fusion proteins may advantageously recruit desired immune effector cell function(s) in a therapeutic context, where it is well known that immune effector cells having different specialized immune functions can be distinguished from one another on the basis of their differential expression of a wide variety of cell surface antigens, such as many of the antigens described herein to which binding domain polypeptides can specifically bind. Immune effector cells include any cell that is capable of directly mediating an activity which is a component of immune system function, including cells having such capability naturally or as a result of genetic engineering.

[0111] In certain embodiments an immune effector cell comprises a cell surface receptor for an immunoglobulin, such as a receptor for an immunoglobulin constant region and including the class of receptors commonly referred to as “Fc receptors” (FcR). A number of FcR have been structurally and/or functionally characterized and are well known in the art, including FcR having specific abilities to interact with a restricted subset of immunoglobulin heavy chain isotypes, or that interact with Fc domains with varying affinities, and/or which may be expressed on restricted subsets of immune effector cells under certain conditions (e.g., Kijimoto-Ochichai et al., 2002 Cell Mol. Life Sci. 59:648; Davis et al., 2002 Curr. Top. Microbiol. Immunol. 266:85; Pawankar, 2001 Curr. Opin. Allerg. Clin. Immunol. 1:3; Radaev et al., 2002 Mol. Immunol. 38:1073; Wurzburg et al., 2002 Mol. Immunol. 38:1063; Sulica et al., 2001 Int. Rev. Immunol. 20:371; Underhill et al., 2002 Ann. Rev. Immunol. 20:825; Coggeshall, 2002 Curr. Dir. Autoimm. 5:1; Mimura et al., 2001 Adv. Exp. Med. Biol. 495:49; Baumann et al., 2001 Adv. Exp. Med. Biol. 495:219; Santoso et al., 2001 Ital. Heart J. 2:811; Novak et al., 2001 Curr. Opin. Immunol. 13:721; Fossati et al., 2001 Eur. J. Clin. Invest. 31:821).

[0112] Cells that are capable of mediating ADCC are preferred examples of immune effector cells according to the present invention. Other preferred examples include natural killer (NK) cells, tumor-infiltrating T lymphocytes (TIL), cytotoxic T lymphocytes (CTL), and granulocytic cells such as cells that comprise allergic response mechanisms. Immune effector cells thus include, but are not limited to, cells of hematopoietic origins including cells at various stages of differentiation within myeloid and lymphoid lineages and which may (but need not) express one or more types of functional cell surface FcR, such as T lymphocytes, B lymphocytes, NK cells, monocytes, macrophages, dendritic cells, neutrophils, basophils, eosinophils, mast cells, platelets, erythrocytes, and precursors, progenitors (e.g., hematopoietic stem cells), quiescent, activated and mature forms of such cells. Other immune effector cells may include cells of non-hematopoietic origin that are capable of mediating immune functions, for example, endothelial cells, keratinocytes, fibroblasts, osteoclasts, epithelial cells and other cells. Immune effector cells may also include cells that mediate cytotoxic or cytostatic events, or endocytic, phagocytic, or pinocytotic events, or that effect induction of apoptosis, or that effect microbial immunity or neutralization of microbial infection, or cells that mediate allergic, inflammatory, hypersensitivity and/or autoimmune reactions.

[0113] Allergic response mechanisms are well known in the art and include an antigen (e.g., allergen)-specific component such as an immunoglobulin (e.g., IgE), as well as the cells and mediators which comprise sequelae to allergen-immunoglobulin (e.g., IgE) encounters (e.g., Ott et al., 2000 J. Allerg. Clin. Immunol. 106:429; Barnes, 2000 J. Allerg. Clin. Immunol. 106:5; Togias, 2000 J. Allerg. Clin. Immunol. 105:S599; Akdis et al., 2000 Int. Arch. Allerg. Immunol. 121:261; Beach, 2000 Occup. Med. 15:455). Particularly with regard to binding domain-immunoglobulin fusion proteins of the present invention that interact with FcR, certain embodiments of the present invention contemplate fusion proteins that comprise one or more IgE-derived domains and that are capable of inducing an allergic response mechanism that comprises IgE-specific FcR, as also noted above and as described in the cited references. Without wishing to be bound by theory, and as disclosed herein, fusion proteins of the present invention may comprise portions of IgE heavy chain Fc domain polypeptides, whether expressed as cell surface proteins (e.g., with a plasma membrane anchor domain) or as soluble proteins (e.g., without a plasma membrane anchor domain). Further according to non-limiting theory, recruitment and induction of an allergic response mechanism (e.g., an FcR-epsilon expressing immune effector cell) may proceed as the result of either or both of the presence of an IgE Fc domain (e.g., that is capable of triggering an allergic mechanism by FcR crosslinking) and the presence of the cognate antigen to which the binding domain specifically binds. The present invention therefore exploits induction of allergic response mechanisms in heretofore unappreciated contexts, such as treatment of a malignant condition or a B-cell disorder as described herein.

[0114] An immunoglobulin hinge region polypeptide, as discussed above, includes any hinge peptide or polypeptide that occurs naturally, as an artificial peptide or as the result of genetic engineering and that is situated in an immunoglobulin heavy chain polypeptide between the amino acid residues responsible for forming intrachain immunoglobulin-domain disulfide bonds in CH1 and CH2 regions; hinge region polypeptides for use in the present invention may also include a mutated hinge region polypeptide. Accordingly, an immunoglobulin hinge region polypeptide may be derived from, or may be a portion or fragment of (i.e., one or more amino acids in peptide linkage, typically 15-115 amino acids, preferably 95-110, 80-94, 60-80, or 5-65 amino acids, preferably 10-50, more preferably 15-35, still more preferably 18-32, still more preferably 20-30, still more preferably 21, 22, 23, 24, 25, 26, 27, 28 or 29 amino acids) an immunoglobulin polypeptide chain region classically regarded as having hinge function, as described above, but a hinge region polypeptide for use in the instant invention need not be so restricted and may include amino acids situated (according to structural criteria for assigning a particular residue to a particular domain that may vary, as known in the art) in an adjoining immunoglobulin domain such as a CH1 domain or a CH2 domain, or in the case of certain artificially engineered immunoglobulin constructs, an immunoglobulin variable region domain.

[0115] Wild-type immunoglobulin hinge region polypeptides include any naturally occurring hinge region that is located between the constant region domains, CH1 and CH2, of an immunoglobulin. The wild-type immunoglobulin hinge region polypeptide is preferably a human immunoglobulin hinge region polypeptide, preferably comprising a hinge region from a human IgG, IgA or IgE immunoglobulin, and more preferably, a hinge region polypeptide from a wild-type or mutated human IgG1 isotype as described herein. As is known to the art, despite the tremendous overall diversity in immunoglobulin amino acid sequences, immunoglobulin primary structure exhibits a high degree of sequence conservation in particular portions of immunoglobulin polypeptide chains, notably with regard to the occurrence of cysteine residues which, by virtue of their sulfhydryl groups, offer the potential for disulfide bond formation with other available sulfhydryl groups. Accordingly, in the context of the present invention wild-type immunoglobulin hinge region polypeptides may be regarded as those that feature one or more highly conserved (e.g., prevalent in a population in a statistically significant manner) cysteine residues, and in certain preferred embodiments a mutated hinge region polypeptide may be selected that contains zero or one cysteine residue and that is derived from such a wild-type hinge region.

[0116] In certain preferred embodiments wherein the hinge region polypeptide is a mutated human IgG1 immunoglobulin hinge region polypeptide that is derived from a wild-type hinge region, it is noted that the wild-type human IgG1 hinge region polypeptide sequence comprises three non-adjacent cysteine residues, referred to as a first cysteine of the wild-type hinge region, a second cysteine of the wild-type hinge region and a third cysteine of the wild-type hinge region, respectively, proceeding along the hinge region sequence from the polypeptide N-terminus toward the C-terminus. Accordingly, in certain such embodiments of the present invention, the mutated human IgG1 immunoglobulin hinge region polypeptide contains two cysteine residues and the first cysteine of the wild-type hinge region is not mutated. In certain other embodiments of the present invention the mutated human IgG1 immunoglobulin hinge region polypeptide contains no more than one cysteine residue, and in certain other embodiments the mutated human IgG1 immunoglobulin hinge region polypeptide contains no cysteine residues.

[0117] The binding domain-immunoglobulin fusion proteins of the present invention expressly do not contemplate any fusion protein that is disclosed in U.S. Pat. No. 5,892,019. For example, and as disclosed in U.S. Pat. No. 5,892,019, a mutated human IgG1 hinge region described therein has a substitution or deletion of the first IgG1 hinge region cysteine residue, but retains both of the second and third IgG1 hinge region cysteine residues that correspond to the second and third cysteines of the wild-type IgG1 hinge region sequence. This reference discloses that the first cysteine residue of the wild-type IgG1 hinge region is replaced to prevent interference, by the first cysteine residue, with proper assembly of the single chain immunoglobulin-like polypeptide described therein into an immunoglobulin-like dimer. As also disclosed in this reference, the second and third cysteines of the IgG1 hinge region are retained to provide interchain disulfide linkage between two heavy chain constant regions to promote dimer formation, which further according to U.S. Pat. No. 5,892,019 results in an immunoglobulin-like dimer having effector function such as ADCC capability.

[0118] By contrast and as described herein, the binding domain-immunogloblin fusion proteins of the present invention, which are capable of ADCC, are not so limited and may comprise, in pertinent part, (i) a wild-type human IgG1 immunoglobulin hinge region polypeptide, (ii) a mutated human IgG1 immunoglobulin hinge region polypeptide that is derived from a wild-type immunoglobulin hinge region polypeptide having three or more cysteine residues, wherein the mutated human IgG1 immunoglobulin hinge region polypeptide contains two cysteine residues and wherein a first cysteine of the wild-type hinge region is not mutated, (iii) a mutated human IgG1 immunoglobulin hinge region polypeptide that is derived from a wild-type immunoglobulin hinge region polypeptide having three or more cysteine residues, wherein the mutated human IgG1 immunoglobulin hinge region polypeptide contains no more than one cysteine residue, or (iv) a mutated human IgG1 immunoglobulin hinge region polypeptide that is derived from a wild-type immunoglobulin hinge region polypeptide having three or more cysteine residues, wherein the mutated human IgG1 immunoglobulin hinge region polypeptide contains no cysteine residues. In particular, the present invention thus offers unexpected advantages associated with retention by the fusion proteins described herein of the ability to mediate ADCC even where the ability to dimerize via IgG1 hinge region interchain disulfide bonds is ablated or compromised by the removal or replacement of one, two or three hinge region cysteine residues, and even where the first cysteine of the IgG1 hinge region is not mutated.

[0119] A mutated immunoglobulin hinge region polypeptide may comprise a hinge region that has its origin in an immunoglobulin of a species, of an immunoglobulin isotype or class, or of an immunoglobulin subclass that is different from that of the CH2 and CH3 domains. For instance, in certain embodiments of the invention, the binding domain-immunoglobulin fusion protein may comprise a binding domain polypeptide that is fused to an immunoglobulin hinge region polypeptide comprising a wild-type human IgA hinge region polypeptide, or a mutated human IgA hinge region polypeptide that contains zero or only one cysteine residues, as described herein, or a wild-type human IgG1 hinge region polypeptide or a wild-type human IgE hinge region polypeptide or a mutated human IgG1 hinge region polypeptide that is mutated to contain zero, one or two cysteine residues wherein the first cysteine of the wild-type hinge region is not mutated, as also described herein. Such a hinge region polypeptide may be fused to an immunoglobulin heavy chain CH2 region polypeptide from a different Ig isotype or class, for example an IgA or an IgE or an IgG subclass, which in certain preferred embodiments will be the IgG1 subclass and in certain other preferred embodiments may be any one of the IgG2, IgG3 or IgG4 subclasses.

[0120] For example, and as described in greater detail below, in certain embodiments of the present invention an immunoglobulin hinge region polypeptide is selected which is derived from a wild-type human IgA hinge region that naturally comprises three cysteines, where the selected hinge region polypeptide is truncated relative to the complete hinge region such that only one of the cysteine residues remains (e.g., SEQ ID NOS:35-36). Similarly, in certain other embodiments of the invention, the binding domain-immunoglobulin fusion protein comprises a binding domain polypeptide that is fused to an immunoglobulin hinge region polypeptide comprising a mutated hinge region polypeptide in which the number of cysteine residues is reduced by amino acid substitution or deletion, for example a mutated IgG1 hinge region containing zero, one or two cysteine residues as described herein. A mutated hinge region polypeptide may thus be derived from a wild-type immunoglobulin hinge region that contains one or more cysteine residues. In certain embodiments, a mutated hinge region polypeptide may contain zero or only one cysteine residue, wherein the mutated hinge region polypeptide is derived from a wild type immunoglobulin hinge region that contains, respectively, one or more or two or more cysteine residues. In the mutated hinge region polypeptide, the cysteine residues of the wild-type immunoglobulin hinge region are preferably substituted with amino acids that are incapable of forming a disulfide bond. In one embodiment of the invention, the mutated hinge region polypeptide is derived from a human IgG wild-type hinge region polypeptide, which may include any of the four human IgG isotype subclasses, IgG1, IgG2, IgG3 or IgG4. In certain preferred embodiments, the mutated hinge region polypeptide is derived from a human IgG1 wild-type hinge region polypeptide. By way of example, a mutated hinge region polypeptide derived from a human IgG1 wild-type hinge region polypeptide may comprise mutations at two of the three cysteine residues in the wild-type immunoglobulin hinge region, or mutations at all three cysteine residues.

[0121] The cysteine residues that are present in a wild-type immunoglobulin hinge region and that are removed by mutagenesis according to particularly preferred embodiments of the present invention include cysteine residues that form, or that are capable of forming, interchain disulfide bonds. Without wishing to be bound by theory, the present invention contemplates that mutation of such hinge region cysteine residues, which are believed to be involved in formation of interchain disulfide bridges, reduces the ability of the subject invention binding domain-immunoglobulin fusion protein to dimerize (or form higher oligomers) via interchain disulfide bond formation, while surprisingly not ablating the ability of the fusion protein to promote antibody dependent cell-mediated cytotoxicity (ADCC) or to fix complement. In particular, the Fc receptors (FcR) which mediate ADCC (e.g., FcRIII, CD16) exhibit low affinity for immunoglobulin Fc domains, suggesting that functional binding of Fc to FcR requires avidity stabilization of the Fc-FcR complex by virtue of the dimeric structure of heavy chains in a conventional antibody, and/or FcR aggregation and cross-linking by a conventional Ab Fc structure. (Sonderman et al., 2000 Nature 406:267; Radaev et al., 2001 J. Biol. Chem. 276:16469; Radaev et al., 2001 J. Biol. Chem. 276:16478; Koolwijk et al., 1989 J. Immunol. 143:1656; Kato et al., 2000 Immunol. Today 21:310.) Hence, the binding domain-immunoglobulin fusion proteins of the present invention provide the advantages associated with single-chain immunoglobulin fusion proteins while also unexpectedly retaining immunological activity. Similarly, the ability to fix complement is typically associated with immunoglobulins that are dimeric with respect to heavy chain constant regions such as those that comprise Fc, while the binding domain-immunoglobulin fusion proteins of the present invention, which may, due to the replacement or deletion of hinge region cysteine residues or due to other structural modifications as described herein, have compromised or ablated abilities to form interchain disulfide bonds, exhibit the unexpected ability to fix complement. Additionally, according to certain embodiments of the present invention wherein a binding domain-immunoglobulin fusion protein may comprise one or more of a human IgE hinge region polypeptide, a human IgE CH2 constant region polypeptide, a human IgE CH3 constant region polypeptide, and a human IgE CH4 constant region polypeptide, the invention fusion proteins unexpectedly retain the immunological activity of mediating ADCC and/or of inducing an allergic response mechanism.

[0122] Selection of an immunoglobulin hinge region polypeptide according to certain embodiments of the subject invention binding domain-immunoglobulin fusion proteins may relate to the use of an “alternative hinge region” polypeptide sequence, which includes a polypeptide sequence that is not necessarily derived from any immunoglobulin hinge region sequence per se. Instead, an alternative hinge region refers to a hinge region polypeptide that comprises an amino acid sequence of at least ten consecutive amino acids, and in certain embodiments at least 11, 12, 13, 14, 15, 16, 17, 18, 19, 20, 21-25, 26-30, 31-50, 51-60, 71-80, 81-90, or 91-110 amino acids that is present in a sequence selected from any one of SEQ ID NOS: 215, 216, 217, 218, 223, 224, 6, 15, 16. 35, 36, 37, 41, 207, 208, 223, 275, 276, 277, 296, 300, 350, 390, 391, 392, 396, 397, 398, 488, 582, 584, 586, for example a polypeptide sequence derived from a region located between intrachain disulfide-generated immunoglobulin-like loop domains of immunoglobulin gene superfamily members such as CD2 (e.g., Genbank Acc. No. NM_{—}001767), CD4 (e.g., Genbank Acc. No. NM_{—}000616), CD5 (e.g., Genbank Acc. No. BC027901), CD6 (e.g., Genbank Acc. No. NM_{—}006725), CD7 (e.g., Genbank Acc. Nos. XM_{—}046782, BC009293, NM_{—}006137) or CD8 (e.g., Genbank Acc. No. M12828), or other Ig superfamily members. By way of non-limiting example, an alternative hinge region may provide a glycosylation site as provided herein, or may provide a human gene-derived polypeptide sequence for purposes of enhancing the degree of “humanization” of a fusion protein, or may comprise an amino acid sequence that reduces the ability of a fusion protein to form multimers or oligomers or aggregates or the like. Certain alternative hinge region polypeptide sequences as described herein may be derived from the polypeptide sequences of immunoglobulin gene superfamily members that are not actual immunoglobulins per se. For instance and according to non-limiting theory, certain polypeptide sequences that are situated between intrachain disulfide-generated immunoglobulin loop domain of immunoglobulin gene super-family member proteins may be used as alternative hinge region polypeptides as provided herein, or may be further modified for such use.

[0123] As noted above, binding domain-immunoglobulin fusion proteins are believed, according to non-limiting theory, to be compromised in their ability to dimerize via interchain disulfide bond formation, and further according to theory, this property is a consequence of a reduction in the number of cysteine residues that are present in the immunoglobulin hinge region polypeptide selected for inclusion in the construction of the fusion protein. Determination of the relative ability of a polypeptide to dimerize is well within the knowledge of the relevant art, where any of a number of established methodologies may be applied to detect protein dimerization (see, e.g., Scopes, Protein Purification: Principles and Practice, 1987 Springer-Verlag, New York). For example, biochemical separation techniques for resolving proteins on the basis of molecular size (e.g., gel electrophoresis, gel filtration chromatography, analytical ultracentrifugation, etc.), and/or comparison of protein physicochemical properties before and after introduction of sulfhydryl-active (e.g., iodoacetamide, N-ethylmaleimide) or disulfide-reducing (e.g., 2-mercaptoethanol, dithiothreitol) agents, or other equivalent methodologies, may all be employed for determining a degree of polypeptide dimerization or oligomerization, and for determining possible contribution of disulfide bonds to such potential quarternary structure. In certain embodiments, the invention relates to a binding domain-immunoglobulin fusion protein that exhibits a reduced (i.e., in a statistically significant manner relative to an appropriate IgG-derived control) ability to dimerize, relative to a wild-type human immunoglobulin G hinge region polypeptide as provided herein. Accordingly, those familiar with the art will be able readily to determine whether a particular fusion protein displays such reduced ability to dimerize.

[0124] Compositions and methods for preparation of immunoglobulin fusion proteins are well known in the art, as described for example, in U.S. Pat. No. 5,892,019, which discloses recombinant antibodies that are the products of a single encoding polynucleotide but which are not binding domain-immunoglobulin fusion proteins according to the present invention.

[0125] For an immunoglobulin fusion protein of the invention which is intended for use in humans, the constant regions will typically be of human sequence origin, to minimize a potential anti-human immune response and to provide appropriate effector functions. Manipulation of sequences encoding antibody constant regions is described in the PCT publication of Morrison and Oi, WO 89/07142. In particularly preferred embodiments, the CH1 domain is deleted and the carboxyl end of the binding domain, or where the binding domain comprises two immunoglobulin variable region polypeptides, the second (i.e., more proximal to the C-terminus) variable region is joined to the amino terminus of CH2 through the hinge region. A schematic diagram depicting the structures of two exemplary binding domain-immunoglobulin fusion proteins is shown in FIG. 11, where it should be noted that in particularly preferred embodiments no interchain disulfide bonds are present, and in other embodiments a restricted number of interchain disulfide bonds may be present relative to the number of such bonds that would be present if wild-type hinge region polypeptides were instead present, and that in other embodiments the fusion protein comprises a mutated hinge region polypeptide that exhibits a reduced ability to dimerize, relative to a wild-type human IgG hinge region polypeptide. Thus, the isolated polynucleotide molecule codes for a single chain immunoglobulin fusion protein having a binding domain that provides specific binding affinity for a selected antigen.

[0126] The invention also contemplates in certain embodiments binding domain-immunoglobulin fusion proteins as provided herein that comprise fused polypeptide sequences or portions thereof derived from a plurality of genetic sources, for example, according to molecular “domain swapping” paradigms. Those having familiarity with the art will readily appreciate that selection of such polypeptide sequences for assembly into a binding domain-immunoglobulin fusion protein may involve determination of what are appropriate portions of each component polypeptide sequence, based on structural and/or functional properties of each such sequence (see, e.g., Carayannopoulos et al., 1996 J. Exp. Med. 183:1579; Harlow et al., Eds., Antibodies: A Laboratory Manual, Cold Spring Harbor Laboratory, Cold Spring Harbor (1988)). The component polypeptide sequences of which the fusion protein is comprised may therefore comprise intact or full-length binding domain, immunoglobulin, linker and/or plasma membrane anchor domain polypeptide sequences, or truncated versions or variants thereof as provided herein. According to these and related embodiments of the invention, any two or more of the candidate component polypeptides of which the subject invention fusion protein may be comprised will be derived from independent sources, such as from immunoglobulin sequences of differing allotype, isotype, subclass, class, or species of origin (e.g., xenotype). Thus, as a non-limiting example, a binding domain polypeptide (or its constituent polypeptides such as one or more variable region polypeptides and/or a linker polypeptide), a hinge region polypeptide, immunoglobulin heavy chain CH2 and CH3 constant region polypeptides and optionally an immunoglobulin heavy chain CH4 constant region polypeptide as may be obtained from an IgM or IgE heavy chain, and a plasma membrane anchor domain polypeptide may all be separately obtained from distinct genetic sources and engineered into a chimeric or fusion protein using well known techniques and according to methodologies described herein.

[0127] Accordingly, a binding domain-immunoglobulin fusion protein according to certain embodiments of the present invention may also therefore comprise in pertinent part an immunoglobulin heavy chain CH3 constant region polypeptide that is a wild-type IgA CH3 constant region polypeptide, or alternatively, that is a mutated IgA CH3 constant region polypeptide that is incapable of associating with a J chain; preferably the IgA CH3 constant region polypeptides are of human origin. By way of brief background, IgA molecules are known to be released into secretory fluids by a mechanism that involves association of IgA into disulfide-linked polymers (e.g., dimers) via a J chain polypeptide (e.g., Genbank Acc. Nos. XM_{—}059628, M12378, M12759; Johansen et al., 1999 Eur. J. Immunol. 29:1701) and interaction of the complex so formed with another protein that acts as a receptor for polymeric immunoglobulin, and which is known as transmembrane secretory component (SC; Johansen et al., 2000 Sc. J. Immunol. 52:240; see also, e.g., Sorensen et al., 2000 Int. Immunol. 12:19; Yoo et al., 1999 J. Biol. Chem. 274:33771; Yoo et al., 2002 J. Immunol. Meth. 261:1; Corthesy, 2002 Trends Biotechnol. 20:65; Symersky et al., 2000 Mol. Immunol. 37:133; Crottet et al., 1999 Biochem. J. 341:299). Interchain disulfide bond formation between IgA Fc domains and J chain is mediated through a penultimate cysteine residue in an 18-amino acid C-terminal extension that forms part of the IgA heavy chain constant region CH3 domain polypeptide (Yoo et al., 1999; Sorensen et al., 2000). Certain embodiments of the subject invention fusion proteins therefore contemplate inclusion of the wild-type IgA heavy chain constant region polypeptide sequence, which is capable of associating with J chain. Certain other embodiments of the invention, however, contemplate fusion proteins that comprise a mutated IgA CH3 constant region polypeptide that is incapable of associating with a J chain. According to such embodiments, two or more residues from the C-terminus of an IgA CH3 constant region polypeptide such as a human IgA CH3 constant region polypeptide may be deleted to yield a truncated CH3 constant region polypeptide as provided herein. In preferred embodiments and as described in greater detail below, a mutated human IgA CH3 constant region polypeptide that is incapable of associating with a J chain comprises such a C-terminal deletion of either four or 18 amino acids. However, the invention need not be so limited, such that the mutated IgA CH3 constant region polypeptide may comprise a deletion of 2, 3, 4, 5, 6, 7, 8, 9, 10, 11, 12, 13, 14, 15, 16, 17, 18, 19, 20, 21-25, 26-30 or more amino acids, so long as the fusion protein is capable of specifically binding an antigen and of at least one immunological activity as provided herein. Alternatively, the invention also contemplates fusion proteins that comprise a mutated IgA CH3 constant region polypeptide that is incapable of associating with a J chain by virtue of replacement of the penultimate cysteine, or by chemical modification of that amino acid residue, in a manner that prevents interchain disulfide bond formation. Methods for determining whether a fusion protein can associate with a J chain will be known to those having familiarity with the art and are described herein, including in the cited references.

[0128] As also described herein and according to procedures known in the art, the fusion protein may further be tested routinely for immunological activity, for instance, in ADCC or CDC assays. As an illustrative example, a fusion protein according to such an embodiment may comprise a binding domain polypeptide derived from a human heavy chain variable region polypeptide sequence, a human IgA-derived immunoglobulin hinge region polypeptide sequence, a human IgG1 immunoglobulin heavy chain CH2 constant region polypeptide sequence, a human IgG2 immunoglobulin heavy chain CH3 constant region polypeptide sequence, and optionally a human IgE immunoglobulin heavy chain CH4 constant region polypeptide sequence and/or a human TNF-α receptor type 1 (TNFR1) plasma membrane anchor domain polypeptide sequence that comprises a cytoplasmic tail polypeptide which is capable of apoptotic signaling. The invention therefore contemplates these and other embodiments according to the present invention in which two or more polypeptide sequences that are present in a fusion protein have independent genetic origins.

[0129] As noted above, in certain embodiments the binding protein-immunoglobulin fusion protein comprises at least one immunoglobulin variable region polypeptide, which may be a light chain or a heavy chain variable region polypeptide, and in certain embodiments the fusion protein comprises at least one such light chain V-region and one such heavy chain V-region and at least one linker peptide that is fused to each of the V-regions. Construction of such binding domains, for example single chain Fv domains, is well known in the art and is described in greater detail in the Examples below, and has been described, for example, in U.S. Pat. No. 5,892,019 and references cited therein; selection and assembly of single-chain variable regions and of linker polypeptides that may be fused to each of a heavy chain-derived and a light chain-derived V region (e.g., to generate a binding domain that comprises a single-chain Fv polypeptide) is also known to the art and described herein and, for example, in U.S. Pat. No. 5,869,620, U.S. Pat. No. 4,704,692 and U.S. Pat. No. 4,946,778. In certain embodiments all or a portion of an immunoglobulin sequence that is derived from a non-human source may be “humanized” according to recognized procedures for generating humanized antibodies, i.e., immunoglobulin sequences into which human Ig sequences are introduced to reduce the degree to which a human immune system would perceive such proteins as foreign (see, e.g., U.S. Pat. Nos. 5,693,762; 5,585,089; 4,816,567; 5,225,539; 5,530,101; and references cited therein).

[0130] Binding domain-immunoglobulin fusion proteins as described herein may, according to certain embodiments, desirably comprise sites for glycosylation, e.g., covalent attachment of carbohydrate moieties such as monosaccharides or oligosaccharides. Incorporation of amino acid sequences that provide substrates for polypeptide glycosylation is within the scope of the relevant art, including, for example, the use of genetic engineering or protein engineering methodologies to obtain a polypeptide sequence containing the classic Asn-X-Ser/Thr site for N-(asparagine)-linked glycosylation, or a sequence containing Ser or Thr residues that are suitable substrates for O-linked glycosylation, or sequences amenable to C-mannosylation, glypiation/glycosylphosphatidylinositol modification, or phosphoglycation, all of which can be identified according to art-established criteria (e.g., Spiro, 2002 Glybiology 12:43R). Without wishing to be bound by theory, glycosylated fusion proteins having particular amino acid sequences may beneficially possess attributes associated with one or more of improved solubility, enhanced stability in solution, enhanced physiological stability, improved bioavailability including in vivo biodistribution, and superior resistance to proteases, all in a statistically significant manner, relative to fusion proteins having the same or highly similar amino acid sequences but lacking glycosyl moieties. In certain preferred embodiments the subject invention fusion protein comprises a glycosylation site that is present in a linker as provided herein, and in certain other preferred embodiments the subject invention fusion protein comprises a glycosylation site that is present in a hinge region polypeptide sequence as provided herein.

[0131] In certain preferred embodiments of the present invention, the binding domain-immunoglobulin fusion protein is a protein or glycoprotein that is capable of being expressed by a host cell such that it localizes to the cell surface. Binding domain-immunoglobulin fusion proteins that localize to the cell surface may do so by virtue of having naturally present or artificially introduced structural features that direct the fusion protein to the cell surface (e.g., Nelson et al. 2001 Trends Cell Biol. 11:483; Ammon et al., 2002 Arch. Physiol. Biochem. 110:137; Kasai et al., 2001 J. Cell Sci. 114:3115; Watson et al., 2001 Am. J. Physiol. Cell Physiol. 281:C215; Chatterjee et al., 200 J. Biol. Chem. 275:24013) including by way of illustration and not limitation, secretory signal sequences, leader sequences, plasma membrane anchor domain polypeptides such as hydrophobic transmembrane domains (e.g., Heuck et al., 2002 Cell Biochem. Biophys. 36:89; Sadlish et al., 2002 Biochem J. 364:777; Phoenix et al., 2002 Mol. Membr. Biol. 19:1; Minke et al., 2002 Physiol. Rev. 82:429) or glycosylphosphatidylinositol attachment sites (“glypiation” sites, e.g., Chatterjee et al., 2001 Cell Mol. Life Sci. 58:1969; Hooper, 2001 Proteomics 1:748; Spiro, 2002 Glycobiol. 12:43R), cell surface receptor binding domains, extracellular matrix binding domains, or any other structural feature that causes the fusion protein to localize to the cell surface. Particularly preferred are fusion proteins that comprise a plasma membrane anchor domain which includes a transmembrane polypeptide domain, typically comprising a membrane spanning domain which includes a hydrophobic region capable of energetically favorable interaction with the phospholipid fatty acyl tails that form the interior of the plasma membrane bilayer. Such features are well known to those of ordinary skill in the art, who will further be familiar with methods for introducing nucleic acid sequences encoding these features into the subject expression constructs by genetic engineering, and with routine testing of such constructs to verify cell surface localization of the product.

[0132] According to certain further embodiments, a plasma membrane anchor domain polypeptide comprises such a transmembrane domain polypeptide and also comprises a cytoplasmic tail polypeptide, which refers to a region or portion of the polypeptide sequence that contacts the cytoplasmic face of the plasma membrane and/or is in contact with the cytosol or other cytoplasmic components. A large number of cytoplasmic tail polypeptides are known that comprise the intracellular portions of plasma membrane transmembrane proteins, and discrete functions have been identified for many such polypeptides, including biological signal transduction (e.g., activation or inhibition of protein kinases, protein phosphatases, G-proteins, cyclic nucleotides and other second messengers, ion channels, secretory pathways), biologically active mediator release, stable or dynamic association with one or more cytoskeletal components, cellular differentiation, cellular activation, mitogenesis, cytostasis, apoptosis and the like (e.g., Maher et al., 2002 Immunol. Cell Biol. 80:131; El Far et al., 2002 Biochem J. 365:329; Teng et al., 2002 Genome Biol. 2REVIEWS:3012; Simons et al., 2001 Cell Signal 13:855; Furie et al., 2001 Thromb. Haemost. 86:214; Gaffen, 2001 Cytokine 14:63; Dittel, 2000 Arch. Immunol. Ther. Exp. (Warsz.) 48:381; Parnes et al., 2000 Immunol. Rev. 176:75; Moretta et al., 2000 Semin. Immunol. 12:129; Ben Ze'ev, 1999 Ann. N.Y. Acad. Sci. 886:37; Marsters et al., Recent Prog. Horm. Res. 54:225).

[0133] In the context of methods of using binding domain-immunoglobulin fusion proteins for the treatment of a malignant condition or a B-cell disorder as provided herein, the present invention contemplates certain embodiments wherein a binding domain-immunoglobulin fusion protein that comprises a plasma membrane anchor domain polypeptide is expressed at a cell surface and further comprises a cytoplasmic tail polypeptide which comprises an apoptosis signaling polypeptide sequence. A number of apoptosis signaling polypeptide sequences are known to the art, as reviewed, for example, in When Cells Die: A Comprehensive Evaluation of Apoptosis and Programmed Cell Death (R. A. Lockshin et al., Eds., 1998 John Wiley & Sons, New York; see also, e.g., Green et al., 1998 Science 281:1309 and references cited therein; Ferreira et al., 2002 Clin. Canc. Res. 8:2024; Gurumurthy et al., 2001 Cancer Metastas. Rev. 20:225; Kanduc et al., 2002 Int. J. Oncol. 21:165). Typically an apoptosis signaling polypeptide sequence comprises all or a portion of, or is derived from, a receptor death domain polypeptide, for instance, FADD (e.g., Genbank Acc. Nos. U24231, U43184, AF009616, AF009617, NM_{—}012115), TRADD (e.g., Genbank Acc. No. NM_{—}003789), RAIDD (e.g., Genbank Acc. No. U87229), CD95 (FAS/Apo-1; e.g., Genbank Acc. Nos. X89101, NM_{—}003824, AF344850, AF344856), TNF-α-receptor-1 (TNFR1, e.g., Genbank Acc. Nos. 563368, AF040257), DR5 (e.g., Genbank Acc. No. AF020501, AF016268, AF012535), an ITIM domain (e.g., Genbank Acc. Nos. AF081675, BC015731, NM_{—}006840, NM_{—}006844, NM_{—}006847, XM_{—}017977; see, e.g., Billadeau et al., 2002 J. Clin. Invest. 109:161), an ITAM domain (e.g., Genbank Acc. Nos. NM_{—}005843, NM_{—}003473, BC030586; see, e.g., Billadeau et al., 2002), or other apoptosis-associated receptor death domain polypeptides known to the art, for example, TNFR2 (e.g., Genbank Acc. No. L49431, L49432), caspase/procaspase-3 (e.g., Genbank Acc. No. XM_{—}54686), caspase/procaspase-8 (e.g., AF380342, NM_{—}004208, NM_{—}001228, NM_{—}033355, NM_{—}033356, NM_{—}033357, NM_{—}033358), caspase/procaspase-2 (e.g., Genbank Acc. No. AF314174, AF314175), etc.

[0134] Cells in a biological sample that are suspected of undergoing apoptosis may be examined for morphological, permeability or other changes that are indicative of an apoptotic state. For example by way of illustration and not limitation, apoptosis in many cell types may cause altered morphological appearance such as plasma membrane blebbing, cell shape change, loss of substrate adhesion properties or other morphological changes that can be readily detected by a person having ordinary skill in the art, for example by using light microscopy. As another example, cells undergoing apoptosis may exhibit fragmentation and disintegration of chromosomes, which may be apparent by microscopy and/or through the use of DNA-specific or chromatin-specific dyes that are known in the art, including fluorescent dyes. Such cells may also exhibit altered plasma membrane permeability properties as may be readily detected through the use of vital dyes (e.g., propidium iodide, trypan blue) or by the detection of lactate dehydrogenase leakage into the extracellular milieu. These and other means for detecting apoptotic cells by morphologic criteria, altered plasma membrane permeability and related changes will be apparent to those familiar with the art.

[0135] In another embodiment of the invention wherein a binding domain-immunoglobulin fusion protein that is expressed at a cell surface comprises a plasma membrane anchor domain having a transmembrane domain and a cytoplasmic tail that comprises an apoptosis signaling polypeptide, cells in a biological sample may be assayed for translocation of cell membrane phosphatidylserine (PS) from the inner to the outer leaflet of the plasma membrane, which may be detected, for example, by measuring outer leaflet binding by the PS-specific protein annexin. (Martin et al., J. Exp. Med. 182:1545, 1995; Fadok et al., J. Immunol. 148:2207, 1992.) In still other related embodiments of the invention, including embodiments wherein the binding domain-immunoglobulin fusion protein is expressed at the cell surface and comprises a plasma membrane anchor domain having an apoptosis signaling polypeptide and also including embodiments wherein the binding domain-immunoglobulin fusion protein is a soluble protein that lacks a membrane anchor domain and that is capable of inducing apoptosis, a cellular response to an apoptogen is determined by an assay for induction of specific protease activity in any member of a family of apoptosis-activated proteases known as the caspases (see, e.g., Green et al., 1998 Science 281:1309). Those having ordinary skill in the art will be readily familiar with methods for determining caspase activity, for example by determination of caspase-mediated cleavage of specifically recognized protein substrates. These substrates may include, for example, poly-(ADP-ribose) polymerase (PARP) or other naturally occurring or synthetic peptides and proteins cleaved by caspases that are known in the art (see, e.g., Ellerby et al., 1997 J. Neurosci. 17:6165). The synthetic peptide Z-Tyr-Val-Ala-Asp-AFC (SEQ ID NO:______;), wherein “Z” indicates a benzoyl carbonyl moiety and AFC indicates 7-amino-4-trifluoromethylcoumarin (Kluck et al., 1997 Science 275:1132; Nicholson et al., 1995 Nature 376:37), is one such substrate. Other non-limiting examples of substrates include nuclear proteins such as U1-70 kDa and DNA-PKcs (Rosen and Casciola-Rosen, 1997 J. Cell. Biochem. 64:50; Cohen, 1997 Biochem. J. 326:1). Cellular apoptosis may also be detected by determination of cytochrome c that has escaped from mitochondria in apoptotic cells (e.g., Liu et al., Cell 86:147, 1996). Such detection of cytochrome c may be performed spectrophotometrically, immunochemically or by other well established methods for determining the presence of a specific protein. Persons having ordinary skill in the art will readily appreciate that there may be other suitable techniques for quantifying apoptosis.

[0136] Once a binding domain-immunoglobulin fusion protein as provided herein has been designed, DNAs encoding the polypeptide may be synthesized via oligonucleotide synthesis as described, for example, in Sinha et al., Nucleic Acids Res., 12, 4539-4557 (1984); assembled via PCR as described, for example in Innis, Ed., PCR Protocols, Academic Press (1990) and also in Better et al. J. Biol. Chem. 267, 16712-16118 (1992); cloned and expressed via standard procedures as described, for example, in Ausubel et al., Eds., Current Protocols in Molecular Biology, John Wiley & Sons, New York (1989) and also in Robinson et al., Hum. Antibod. Hybridomas, 2, 84-93 (1991); and tested for specific antigen binding activity, as described, for example, in Harlow et al., Eds., Antibodies: A Laboratory Manual, Chapter 14, Cold Spring Harbor Laboratory, Cold Spring Harbor (1988) and Munson et al., Anal. Biochem., 107, 220-239 (1980).

[0137] The preparation of single polypeptide chain binding molecules of the Fv region, single-chain Fv molecules, is described in U.S. Pat. No. 4,946,778, which is incorporated herein by reference. In the present invention, single-chain Fv-like molecules are synthesized by encoding a first variable region of the heavy or light chain, followed by one or more linkers to the variable region of the corresponding light or heavy chain, respectively. The selection of appropriate linker(s) between the two variable regions is described in U.S. Pat. No. 4,946,778 (see also, e.g., Huston et al., 1993 Int. Rev. Immunol. 10:195). An exemplary linker described herein is (Gly-Gly-Gly-Gly-Ser)₃. The linker is used to convert the naturally aggregated but chemically separate heavy and light chains into the amino terminal antigen binding portion of a single polypeptide chain, wherein this antigen binding portion will fold into a structure similar to the original structure made of two polypeptide chains and thus retain the ability to bind to the antigen of interest. The nucleotide sequences encoding the variable regions of the heavy and light chains, joined by a sequence encoding a linker, are joined to a nucleotide sequence encoding antibody constant regions. The constant regions are those which permit the resulting polypeptide to form interchain disulfide bonds to form a dimer, and which contain desired effector functions, such as the ability to mediate antibody-dependent cellular cytotoxicity (ADCC). For an immunoglobulin-like molecule of the invention which is intended for use in humans, the constant regions will typically be substantially human to minimize a potential anti-human immune response and to provide appropriate effector functions. Manipulation of sequences encoding antibody constant regions is described in the PCT publication of Morrison and Oi, WO 89/07142, which is incorporated herein by reference. In preferred embodiments, the CH1 domain is deleted and the carboxyl end of the binding domain polypeptide (e.g., an immunoglobulin variable region polypeptide) is joined to the amino terminus of CH2 via a hinge region polypeptide as provided herein.

[0138] As described above, the present invention provides recombinant expression constructs capable of directing the expression of binding domain-immunoglobulin fusion proteins as provided herein. The amino acids, which occur in the various amino acid sequences referred to herein, are identified according to their well known three-letter or single-letter abbreviations. The nucleotides, which occur in the various DNA sequences or fragments thereof referred herein, are designated with the standard single letter designations used routinely in the art. A given amino acid sequence may also encompass similar amino acid sequences having only minor changes, for example by way of illustration and not limitation, covalent chemical modifications, insertions, deletions and substitutions, which may further include conservative substitutions. Amino acid sequences that are similar to one another may share substantial regions of sequence homology. In like fashion, nucleotide sequences may encompass substantially similar nucleotide sequences having only minor changes, for example by way of illustration and not limitation, covalent chemical modifications, insertions, deletions and substitutions, which may further include silent mutations owing to degeneracy of the genetic code. Nucleotide sequences that are similar to one another may share substantial regions of sequence homology.

[0139] The presence of a malignant condition in a subject refers to the presence of dysplastic, cancerous and/or transformed cells in the subject, including, for example neoplastic, tumor, non-contact inhibited or oncogenically transformed cells, or the like (e.g., melanoma, carcinomas such as adenocarcinoma, squamous cell carcinoma, small cell carcinoma, oat cell carcinoma, etc., sarcomas such as chondrosarcoma, osteosarcoma, etc.) which are known to the art and for which criteria for diagnosis and classification are established. In preferred embodiments contemplated by the present invention, for example, such cancer cells are malignant hematopoietic cells, such as transformed cells of lymphoid lineage and in particular, B-cell lymphomas and the like; cancer cells may in certain preferred embodiments also be epithelial cells such as carcinoma cells. The invention also contemplates B-cell disorders, which may include certain malignant conditions that affect B-cells (e.g., B-cell lymphoma) but which is not intended to be so limited, and which is also intended to encompass autoimmune diseases and in particular, diseases, disorders and conditions that are characterized by autoantibody production.

[0140] Autoantibodies are antibodies that react with self antigens. Autoantibodies are detected in several autoimmune diseases (i.e., a disease, disorder or condition wherein a host immune system generates an inappropriate anti-“self” immune reaction) where they are involved in disease activity. The current treatments for these autoimmune diseases are immunosuppressive drugs that require continuing administration, lack specificity, and cause significant side effects. New approaches that can eliminate autoantibody production with minimal toxicity will address an unmet medical need for a spectrum of diseases that affect many people. The subject invention binding domain-immunoglobulin fusion protein is designed for improved penetration into lymphoid tissues. Depletion of B lymphocytes interrupts the autoantibody production cycle, and allows the immune system to reset as new B lymphocytes are produced from precursors in the bone marrow.

[0141] A number of diseases have been identified for which beneficial effects are believed, according to non-limiting theory, to result from B cell depletion therapy; a brief description of several exemplars of these diseases follows.

[0142] Autoimmune thyroid disease includes Graves' disease and Hashimoto's thyroiditis. In the United States alone, there are about 20 million people who have some form of autoimmune thyroid disease. Autoimmune thyroid disease results from the production of autoantibodies that either stimulate the thyroid to cause hyperthyroidism (Graves' disease) or destroy the thyroid to cause hypothyroidism (Hashimoto's thyroiditis). Stimulation of the thyroid is caused by autoantibodies that bind and activate the thyroid stimulating hormone (TSH) receptor. Destruction of the thyroid is caused by autoantibodies that react with other thyroid antigens.

[0143] Current therapy for Graves' disease includes surgery, radioactive iodine, or antithyroid drug therapy. Radioactive iodine is widely used, since antithyroid medications have significant side effects and disease recurrence is high. Surgery is reserved for patients with large goiters or where there is a need for very rapid normalization of thyroid function. There are no therapies that target the production of autoantibodies responsible for stimulating the TSH receptor. Current therapy for Hashimoto's thyroiditis is levothyroxine sodium, and therapy is usually lifelong because of the low likelihood of remission. Suppressive therapy has been shown to shrink goiters in Hashimoto's thyroiditis, but no therapies that reduce autoantibody production to target the disease mechanism are known.

[0144] Rheumatoid arthritis (RA) is a chronic disease characterized by inflammation of the joints, leading to swelling, pain, and loss of function. RA effects an estimated 2.5 million people in the United States. RA is caused by a combination of events including an initial infection or injury, an abnormal immune response, and genetic factors. While autoreactive T cells and B cells are present in RA, the detection of high levels of antibodies that collect in the joints, called rheumatoid factor, is used in the diagnosis of RA. Current therapy for RA includes many medications for managing pain and slowing the progression of the disease. No therapy has been found that can cure the disease. Medications include nonsteroidal antiinflammatory drugs (NSAIDS), and disease modifying antirheumatic drugs (DMARDS). NSAIDS are effective in benign disease, but fail to prevent the progression to joint destruction and debility in severe RA. Both NSAIDS and DMARDS are associated with significant side effects. Only one new DMARD, Leflunomide, has been approved in over 10 years. Leflunomide blocks production of autoantibodies, reduces inflammation, and slows progression of RA. However, this drug also causes severe side effects including nausea, diarrhea, hair loss, rash, and liver injury.

[0145] Systemic Lupus Erythematosus (SLE) is an autoimmune disease caused by recurrent injuries to blood vessels in multiple organs, including the kidney, skin, and joints. SLE effects over 500,000 people in the United States. In patients with SLE, a faulty interaction between T cells and B cells results in the production of autoantibodies that attack the cell nucleus. These include anti-double stranded DNA and anti-Sm antibodies. Autoantibodies that bind phospholipids are also found in about half of SLE patients, and are responsible for blood vessel damage and low blood counts. Immune complexes accumulate the kidneys, blood vessels, and joints of SLE patients, where they cause inflammation and tissue damage. No treatment for SLE has been found to cure the disease. NSAIDS and DMARDS are used for therapy depending upon the severity of the disease. Plasmapheresis with plasma exchange to remove autoantibodies can cause temporary improvement in SLE patients. There is general agreement that autoantibodies are responsible for SLE, so new therapies that deplete the B cell lineage, allowing the immune system to reset as new B cells are generated from precursors, offer hope for long lasting benefit in SLE patients.

[0146] Sjogren's syndrome is an autoimmune disease characterized by destruction of the body's moisture producing glands. Sjogren's syndrome is one of the most prevalent autoimmune disorders, striking up to 4 million people in the United States. About half of people with Sjogren's also have a connective tissue disease, such as rheumatoid arthritis, while the other half have primary Sjogren's with no other concurrent autoimmune disease. Autoantibodies, including anti-nuclear antibodies, rheumatoid factor, anti-fodrin, and anti-muscarinic receptor are often present in patients with Sjogren's syndrome. Conventional therapy includes corticosteroids.

[0147] Immune Thrombocytopenic purpura (ITP) is caused by autoantibodies that bind to blood platelets and cause their destruction. Some cases of ITP are caused by drugs, and others are associated with infection, pregnancy, or autoimmune disease such as SLE. About half of all cases are classified as “idiopathic”, meaning the cause is unknown. The treatment of ITP is determined by the severity of the symptoms. In some cases, no therapy is needed. In most cases, immunosuppressive drugs are used, including corticosteroids or intravenous infusions of immune globulin to deplete T cells. Another treatment that usually results in an increased number of platelets is removal of the spleen, the organ that destroys antibody-coated platelets. More potent immunosuppressive drugs, including cyclosporine, cyclophosphamide, or azathioprine, are used for patients with severe cases. Removal of autoantibodies by passage of patients' plasma over a Protein A column is used as a second line treatment in patients with severe disease.

[0148] Multiple Sclerosis (MS) is an autoimmune disease characterized by inflammation of the central nervous system and destruction of myelin, which insulates nerve cell fibers in the brain, spinal cord, and body. Although the cause of MS is unknown, it is widely believed that autoimmune T cells are primary contributors to the pathogenesis of the disease. However, high levels of antibodies are present in the cerebral spinal fluid of patients with MS, and some theories predict that the B cell response leading to antibody production is important for mediating the disease. No B cell depletion therapies have been studies in patients with MS. There is no cure for MS. Current therapy is corticosteroids, which can reduce the duration and severity of attacks, but do not affect the course of MS over time. New biotechnology interferon (IFN) therapies for MS have recently been approved.

[0149] Myasthenia Gravis (MG) is a chronic autoimmune neuromuscular disorder that is characterized by weakness of the voluntary muscle groups. MG effects about 40,000 people in the United States. MG is caused by autoantibodies that bind to acetylcholine receptors expressed at neuromuscular junctions. The autoantibodies reduce or block acetylcholine receptors, preventing the transmission of signals from nerves to muscles. There is no known cure for MG. Common treatments include immunosuppression with corticosteroids, cyclosporine, cyclophosphamide, or azathioprine. Surgical removal of the thymus is often used to blunt the autoimmune response. Plasmapheresis, used to reduce autoantibody levels in the blood, is effective in MG, but is short-lived because the production of autoantibodies continues. Plasmapheresis is usually reserved for severe muscle weakness prior to surgery.

[0150] Psoriasis affects approximately five million people. It is an autoimmune inflammation of the skin and joints. Psoriasis is associated with arthritis (psoriatic arthritis) in up to 30% of patients with psoriasis. Many treatments are used, including steroids, UV light retenoids, vitamin D derivatives, cyclosporine, and methotrexate.

[0151] Scleroderma is a chronic autoimmune disease of the connective tissue that is also known as systemic sclerosis. Scleroderma is characterized by an overproduction of collagen, resulting in a thickening of the skin. Approximately 300,000 people in the United States have scleroderma.

[0152] Inflammatory Bowel Disease, including Crohn's disease and ulcerative colitis, is an autoimmune disease of the digestive system.

[0153] The present invention further relates to constructs encoding binding domain-immunoglobulin fusion proteins, and in particular to methods for administering recombinant constructs encoding such proteins that may be expressed, for example, as fragments, analogs and derivatives of such polypeptides. The terms “fragment,” “derivative” and “analog” when referring to binding domain-immunoglobulin fusion polypeptides or fusion proteins, refers to any binding domain-immunoglobulin fusion polypeptide or fusion protein that retains essentially the same biological function or activity as such polypeptide. Thus, an analog includes a proprotein which can be activated by cleavage of the proprotein portion to produce an active binding domain-immunoglobulin fusion polypeptide.

[0154] A fragment, derivative or analog of an binding domain-immunoglobulin fusion polypeptide or fusion protein, including binding domain-immunoglobulin fusion polypeptides or fusion proteins encoded by the cDNAs referred to herein, may be (i) one in which one or more of the amino acid residues are substituted with a conserved or non-conserved amino acid residue (preferably a conserved amino acid residue) and such substituted amino acid residue may or may not be one encoded by the genetic code, or (ii) one in which one or more of the amino acid residues includes a substituent group, or (iii) one in which additional amino acids are fused to the binding domain-immunoglobulin fusion polypeptide, including amino acids that are employed for detection or specific functional alteration of the binding domain-immunoglobulin fusion polypeptide or a proprotein sequence. Such fragments, derivatives and analogs are deemed to be within the scope of those skilled in the art from the teachings herein.

[0155] The polypeptides of the present invention include binding domain-immunoglobulin fusion polypeptides and fusion proteins having binding domain polypeptide amino acid sequences that are identical or similar to sequences known in the art, or fragments or portions thereof. For example by way of illustration and not limitation, a human CD154 molecule extracellular domain [SEQ ID NO:______] is contemplated for use according to the instant invention, as are polypeptides having at least 70% similarity (preferably a 70% identity) and more preferably 90% similarity (more preferably a 90% identity) to the reported polypeptide and still more preferably a 95% similarity (still more preferably a 95% identity) to the reported polypeptides and to portions of such polypeptides, wherein such portions of a binding domain-immunoglobulin fusion polypeptide generally contain at least 30 amino acids and more preferably at least 50 amino acids. Extracellular domains include portions of a cell surface molecule, and in particularly preferred embodiments cell surface molecules that are integral membrane proteins or that comprise a plasma membrane spanning transmembrane domain, that extend beyond the outer leaflet of the plasma membrane phospholipid bilayer when the molecule is expressed at a cell surface, preferably in a manner that exposes the extracellular domain portion of such a molecule to the external environment of the cell, also known as the extracellular milieu. Methods for determining whether a portion of a cell surface molecule comprises an extracellular domain are well known to the art and include experimental determination (e.g., direct or indirect labeling of the molecule, evaluation of whether the molecule can be structurally altered by agents to which the plasma membrane is not permeable such as proteolytic or lipolytic enzymes) or topological prediction based on the structure of the molecule (e.g., analysis of the amino acid sequence of a polypeptide) or other methodologies.

[0156] As known in the art, “similarity” between two polypeptides is determined by comparing the amino acid sequence and conserved amino acid substitutes thereto of the polypeptide to the sequence of a second polypeptide. Fragments or portions of the nucleic acids encoding polypeptides of the present invention may be used to synthesize full-length nucleic acids of the present invention. As used herein, “% identity” refers to the percentage of identical amino acids situated at corresponding amino acid residue positions when two or more polypeptide are aligned and their sequences analyzed using a gapped BLAST algorithm (e.g., Altschul et al., 1997 Nucl. Ac. Res. 25:3389) which weights sequence gaps and sequence mismatches according to the default weightings provided by the National Institutes of Health/NCBI database (Bethesda, Md.; see www.ncbi.nlm.nih.gov/cgi-bin/BLAST/nph-newblast).

[0157] The term “isolated” means that the material is removed from its original environment (e.g., the natural environment if it is naturally occurring). For example, a naturally occurring nucleic acid or polypeptide present in a living animal is not isolated, but the same nucleic acid or polypeptide, separated from some or all of the co-existing materials in the natural system, is isolated. Such nucleic acids could be part of a vector and/or such nucleic acids or polypeptides could be part of a composition, and still be isolated in that such vector or composition is not part of its natural environment.

[0158] The term “gene” means the segment of DNA involved in producing a polypeptide chain; it includes regions preceding and following the coding region “leader and trailer” as well as intervening sequences (introns) between individual coding segments (exons).

[0159] As described herein, the invention provides binding domain-immunoglobulin fusion proteins encoded by nucleic acids that have the binding domain coding sequence fused in frame to an additional immunoglobulin domain encoding sequence to provide for expression of a binding domain polypeptide sequence fused to an additional functional polypeptide sequence that permits, for example by way of illustration and not limitation, detection, functional alteration, isolation and/or purification of the fusion protein. Such fusion proteins may permit functional alteration of a binding domain by containing additional immunoglobulin-derived polypeptide sequences that influence behavior of the fusion product, for example (and as described above) by reducing the availability of sulfhydryl groups for participation in disulfide bond formation, and by conferring the ability to potentiate ADCC and/or CDC.

[0160] Modification of the polypeptide may be effected by any means known to those of skill in this art. The preferred methods herein rely on modification of DNA encoding the fusion protein and expression of the modified DNA. DNA encoding one of the binding domain-immunoglobulin fusions discussed above may be mutagenized using standard methodologies, including those described below. For example, cysteine residues that may otherwise facilitate multimer formation or promote particular molecular conformations can be deleted from a polypeptide or replaced, e.g., cysteine residues that are responsible for aggregate formation. If necessary, the identity of cysteine residues that contribute to aggregate formation may be determined empirically, by deleting and/or replacing a cysteine residue and ascertaining whether the resulting protein aggregates in solutions containing physiologically acceptable buffers and salts. In addition, fragments of binding domain-immunoglobulin fusions may be constructed and used. As noted above, the counterreceptor/ligand binding domains for many candidate binding domain-immunoglobulin fusion proteins have been delineated, such that one having ordinary skill in the art may readily select appropriate polypeptide domains for inclusion in the encoded products of the instant expression constructs.

[0161] Conservative substitutions of amino acids are well-known and may be made generally without altering the biological activity of the resulting binding domain-immunoglobulin fusion protein molecule. For example, such substitutions are generally made by interchanging within the groups of polar residues, charged residues, hydrophobic residues, small residues, and the like. If necessary, such substitutions may be determined empirically merely by testing the resulting modified protein for the ability to bind to the appropriate cell surface receptors in in vitro biological assays, or to bind to appropriate antigens or desired target molecules.

[0162] The present invention further relates to nucleic acids which hybridize to binding domain-immunoglobulin fusion protein encoding polynucleotide sequences as provided herein, or their complements, as will be readily apparent to those familiar with the art, if there is at least 70%, preferably 80-85%, more preferably at least 90%, and still more preferably at least 95%, 96%, 97%, 98% or 99% identity between the sequences. The present invention particularly relates to nucleic acids which hybridize under stringent conditions to the binding domain-immunoglobulin fusion encoding nucleic acids referred to herein. As used herein, the term “stringent conditions” means hybridization will occur only if there is at least 90-95% and preferably at least 97% identity between the sequences. The nucleic acids which hybridize to binding domain-immunoglobulin fusion encoding nucleic acids referred to herein, in preferred embodiments, encode polypeptides which retain substantially the same biological function or activity as the binding domain-immunoglobulin fusion polypeptides encoded by the cDNAs of the references cited herein.

[0163] As used herein, to “hybridize” under conditions of a specified stringency is used to describe the stability of hybrids formed between two single-stranded nucleic acid molecules. Stringency of hybridization is typically expressed in conditions of ionic strength and temperature at which such hybrids are annealed and washed. Typically “high”, “medium” and “low” stringency encompass the following conditions or equivalent conditions thereto: high stringency: 0.1×SSPE or SSC, 0.1% SDS, 65° C.; medium stringency: 0.2×SSPE or SSC, 0.1% SDS, 50° C.; and low stringency: 1.0×SSPE or SSC, 0.1% SDS, 50° C. As known to those having ordinary skill in the art, variations in stringency of hybridization conditions may be achieved by altering the time, temperature and/or concentration of the solutions used for prehybridization, hybridization and wash steps, and suitable conditions may also depend in part on the particular nucleotide sequences of the probe used, and of the blotted, proband nucleic acid sample. Accordingly, it will be appreciated that suitably stringent conditions can be readily selected without undue experimentation where a desired selectivity of the probe is identified, based on its ability to hybridize to one or more certain proband sequences while not hybridizing to certain other proband sequences.

[0164] The nucleic acids of the present invention, also referred to herein as polynucleotides, may be in the form of RNA or in the form of DNA, which DNA includes cDNA, genomic DNA, and synthetic DNA. The DNA may be double-stranded or single-stranded, and if single stranded may be the coding strand or non-coding (anti-sense) strand. A coding sequence which encodes an binding domain-immunoglobulin fusion polypeptide for use according to the invention may be identical to the coding sequence known in the art for any given binding domain-immunoglobulin fusion, or may be a different coding sequence, which, as a result of the redundancy or degeneracy of the genetic code, encodes the same binding domain-immunoglobulin fusion polypeptide.

[0165] The nucleic acids which encode binding domain-immunoglobulin fusion polypeptides for use according to the invention may include, but are not limited to: only the coding sequence for the binding domain-immunoglobulin fusion polypeptide; the coding sequence for the binding domain-immunoglobulin fusion polypeptide and additional coding sequence; the coding sequence for the binding domain-immunoglobulin fusion polypeptide (and optionally additional coding sequence) and non-coding sequence, such as introns or non-coding sequences 5′ and/or 3′ of the coding sequence for the binding domain-immunoglobulin fusion polypeptide, which for example may further include but need not be limited to one or more regulatory nucleic acid sequences that may be a regulated or regulatable promoter, enhancer, other transcription regulatory sequence, repressor binding sequence, translation regulatory sequence or any other regulatory nucleic acid sequence. Thus, the term “nucleic acid encoding” or “polynucleotide encoding” a binding domain-immunoglobulin fusion protein encompasses a nucleic acid which includes only coding sequence for a binding domain-immunoglobulin fusion polypeptide as well as a nucleic acid which includes additional coding and/or non-coding sequence(s).

[0166] Nucleic acids and oligonucleotides for use as described herein can be synthesized by any method known to those of skill in this art (see, e.g., WO 93/01286, U.S. application Ser. No. 07/723,454; U.S. Pat. No. 5,218,088; U.S. Pat. No. 5,175,269; U.S. Pat. No. 5,109,124). Identification of oligonucleotides and nucleic acid sequences for use in the present invention involves methods well known in the art. For example, the desirable properties, lengths and other characteristics of useful oligonucleotides are well known. In certain embodiments, synthetic oligonucleotides and nucleic acid sequences may be designed that resist degradation by endogenous host cell nucleolytic enzymes by containing such linkages as: phosphorothioate, methylphosphonate, sulfone, sulfate, ketyl, phosphorodithioate, phosphoramidate, phosphate esters, and other such linkages that have proven useful in antisense applications (see, e.g., Agrwal et al., Tetrahedron Lett. 28:3539-3542 (1987); Miller et al., J. Am. Chem. Soc. 93:6657-6665 (1971); Stec et al., Tetrahedron Lett. 26:2191-2194 (1985); Moody et al., Nucl. Acids Res. 12:4769-4782 (1989); Uznanski et al., Nucl. Acids Res. (1989); Letsinger et al., Tetrahedron 40:137-143 (1984); Eckstein, Annu. Rev. Biochem. 54:367-402 (1985); Eckstein, Trends Biol. Sci. 14:97-100 (1989); Stein In: Oligodeoxynucleotides. Antisense Inhibitors of Gene Expression, Cohen, Ed., Macmillan Press, London, pp. 97-117 (1989); Jager et al., Biochemistry 27:7237-7246 (1988)).

[0167] In one embodiment, the present invention provides truncated components (e.g., binding domain polypeptide, hinge region polypeptide, linker, etc.) for use in a binding domain-immunoglobulin fusion protein, and in another embodiment the invention provides nucleic acids encoding a binding domain-immunoglobulin fusion protein having such truncated components. A truncated molecule may be any molecule that comprises less than a full length version of the molecule. Truncated molecules provided by the present invention may include truncated biological polymers, and in preferred embodiments of the invention such truncated molecules may be truncated nucleic acid molecules or truncated polypeptides. Truncated nucleic acid molecules have less than the full length nucleotide sequence of a known or described nucleic acid molecule, where such a known or described nucleic acid molecule may be a naturally occurring, a synthetic or a recombinant nucleic acid molecule, so long as one skilled in the art would regard it as a full length molecule. Thus, for example, truncated nucleic acid molecules that correspond to a gene sequence contain less than the full length gene where the gene comprises coding and non-coding sequences, promoters, enhancers and other regulatory sequences, flanking sequences and the like, and other functional and non-functional sequences that are recognized as part of the gene. In another example, truncated nucleic acid molecules that correspond to a mRNA sequence contain less than the full length mRNA transcript, which may include various translated and non-translated regions as well as other functional and non-functional sequences.

[0168] In other preferred embodiments, truncated molecules are polypeptides that comprise less than the full length amino acid sequence of a particular protein or polypeptide component. As used herein “deletion” has its common meaning as understood by those familiar with the art, and may refer to molecules that lack one or more of a portion of a sequence from either terminus or from a non-terminal region, relative to a corresponding full length molecule, for example, as in the case of truncated molecules provided herein. Truncated molecules that are linear biological polymers such as nucleic acid molecules or polypeptides may have one or more of a deletion from either terminus of the molecule or a deletion from a non-terminal region of the molecule, where such deletions may be deletions of 1-1500 contiguous nucleotide or amino acid residues, preferably 1-500 contiguous nucleotide or amino acid residues and more preferably 1-300 contiguous nucleotide or amino acid residues, including deletions of 1, 2, 3, 4, 5, 6, 7, 8, 9, 10, 11, 12, 13, 14, 15, 16, 17, 18, 19, 20, 21, 22, 23, 24, 25, 26, 27, 28, 29, 30, 31-40, 41-50, 51-74, 75-100, 101-150, 151-200, 201-250 or 251-299 contiguous nucleotide or amino acid residues. In certain particularly preferred embodiments truncated nucleic acid molecules may have a deletion of 270-330 contiguous nucleotides. In certain other particularly preferred embodiments truncated polypeptide molecules may have a deletion of 80-140 contiguous amino acids.

[0169] The present invention further relates to variants of the herein referenced nucleic acids which encode fragments, analogs and/or derivatives of a binding domain-immunoglobulin fusion polypeptide. The variants of the nucleic acids encoding binding domain-immunoglobulin fusion may be naturally occurring allelic variants of the nucleic acids or non-naturally occurring variants. As is known in the art, an allelic variant is an alternate form of a nucleic acid sequence which may have at least one of a substitution, a deletion or an addition of one or more nucleotides, any of which does not substantially alter the function of the encoded binding domain-immunoglobulin fusion polypeptide.

[0170] Variants and derivatives of binding domain-immunoglobulin fusion may be obtained by mutations of nucleotide sequences encoding binding domain-immunoglobulin fusion polypeptides or any portion thereof. Alterations of the native amino acid sequence may be accomplished by any of a number of conventional methods. Mutations can be introduced at particular loci by synthesizing oligonucleotides containing a mutant sequence, flanked by restriction sites enabling ligation to fragments of the native sequence. Following ligation, the resulting reconstructed sequence encodes an analog having the desired amino acid insertion, substitution, or deletion.

[0171] Alternatively, oligonucleotide-directed site-specific mutagenesis procedures can be employed to provide an altered gene wherein predetermined codons can be altered by substitution, deletion or insertion. Exemplary methods of making such alterations are disclosed by Walder et al. (Gene 42:133, 1986); Bauer et al. (Gene 37:73, 1985); Craik (BioTechniques, Jan. 1985, 12-19); Smith et al. (Genetic Engineering: Principles and Methods BioTechniques, Jan. 1985, 12-19); Smith et al. (Genetic Engineering: Principles and Methods, Plenum Press, 1981); Kunkel (Proc. Natl. Acad. Sci. USA 82:488, 1985); Kunkel et al. (Methods in Enzymol. 154:367, 1987); and U.S. Pat. Nos. 4,518,584 and 4,737,462.

[0172] As an example, modification of DNA may be performed by site-directed mutagenesis of DNA encoding the protein combined with the use of DNA amplification methods using primers to introduce and amplify alterations in the DNA template, such as PCR splicing by overlap extension (SOE). Site-directed mutagenesis is typically effected using a phage vector that has single- and double-stranded forms, such as M13 phage vectors, which are well-known and commercially available. Other suitable vectors that contain a single-stranded phage origin of replication may be used (see, e.g., Veira et al., Meth. Enzymol. 15:3, 1987). In general, site-directed mutagenesis is performed by preparing a single-stranded vector that encodes the protein of interest (e.g., all or a component portion of a given binding domain-immunoglobulin fusion protein). An oligonucleotide primer that contains the desired mutation within a region of homology to the DNA in the single-stranded vector is annealed to the vector followed by addition of a DNA polymerase, such as E. coli DNA polymerase I (Klenow fragment), which uses the double stranded region as a primer to produce a heteroduplex in which one strand encodes the altered sequence and the other the original sequence. The heteroduplex is introduced into appropriate bacterial cells and clones that include the desired mutation are selected. The resulting altered DNA molecules may be expressed recombinantly in appropriate host cells to produce the modified protein.

[0173] Equivalent DNA constructs that encode various additions or substitutions of amino acid residues or sequences, or deletions of terminal or internal residues or sequences not needed for biological activity are also encompassed by the invention. For example, and as discussed above, sequences encoding Cys residues that are not desirable or essential for biological activity can be altered to cause the Cys residues to be deleted or replaced with other amino acids, preventing formation of incorrect intramolecular disulfide bridges upon renaturation.

[0174] Host organisms include those organisms in which recombinant production of binding domain-immunoglobulin fusion products encoded by the recombinant constructs of the present invention may occur, such as bacteria (for example, E. coli), yeast (for example, Saccharomyces cerevisiae and Pichia pastoris), insect cells and mammals, including in vitro and in vivo expression. Host organisms thus may include organisms for the construction, propagation, expression or other steps in the production of the compositions provided herein; hosts also include subjects in which immune responses take place, as described above. Presently preferred host organisms are E. coli bacterial strains, inbred murine strains and murine cell lines, and human cells, subjects and cell lines.

[0175] The DNA construct encoding the desired binding domain-immunoglobulin fusion is introduced into a plasmid for expression in an appropriate host. In preferred embodiments, the host is a bacterial host. The sequence encoding the ligand or nucleic acid binding domain is preferably codon-optimized for expression in the particular host. Thus, for example, if a human binding domain-immunoglobulin fusion is expressed in bacteria, the codons would be optimized for bacterial usage. For small coding regions, the gene can be synthesized as a single oligonucleotide. For larger proteins, splicing of multiple oligonucleotides, mutagenesis, or other techniques known to those in the art may be used. The sequences of nucleotides in the plasmids that are regulatory regions, such as promoters and operators, are operationally associated with one another for transcription. The sequence of nucleotides encoding a binding domain-immunoglobulin fusion protein may also include DNA encoding a secretion signal, whereby the resulting peptide is a precursor protein. The resulting processed protein may be recovered from the periplasmic space or the fermentation medium.

[0176] In preferred embodiments, the DNA plasmids also include a transcription terminator sequence. As used herein, a “transcription terminator region” is a sequence that signals transcription termination. The entire transcription terminator may be obtained from a protein-encoding gene, which may be the same or different from the inserted binding domain-immunoglobulin fusion encoding gene or the source of the promoter. Transcription terminators are optional components of the expression systems herein, but are employed in preferred embodiments.

[0177] The plasmids used herein include a promoter in operative association with the DNA encoding the protein or polypeptide of interest and are designed for expression of proteins in a suitable host as described above (e.g., bacterial, murine or human) depending upon the desired use of the plasmid (e.g., administration of a vaccine containing binding domain-immunoglobulin fusion encoding sequences). Suitable promoters for expression of proteins and polypeptides herein are widely available and are well known in the art. Inducible promoters or constitutive promoters that are linked to regulatory regions are preferred. Such promoters include, but are not limited to, the T7 phage promoter and other T7-like phage promoters, such as the T3, T5 and SP6 promoters, the trp, lpp, and lac promoters, such as the lacUV5, from E. coli; the P10 or polyhedrin gene promoter of baculovirus/insect cell expression systems (see, e.g., U.S. Pat. Nos. 5,243,041, 5,242,687, 5,266,317, 4,745,051, and 5,169,784) and inducible promoters from other eukaryotic expression systems. For expression of the proteins such promoters are inserted in a plasmid in operative linkage with a control region such as the lac operon.

[0178] Preferred promoter regions are those that are inducible and functional in E. coli. Examples of suitable inducible promoters and promoter regions include, but are not limited to: the E. coli lac operator responsive to isopropyl β-D-thiogalactopyranoside (IPTG; see Nakamura et al., Cell 18:1109-1117, 1979); the metallothionein promoter metal-regulatory-elements responsive to heavy-metal (e.g., zinc) induction (see, e.g., U.S. Pat. No. 4,870,009 to Evans et al.); the phage T7lac promoter responsive to IPTG (see, e.g., U.S. Pat. No. 4,952,496; and Studier et al., Meth. Enzymol. 185:60-89, 1990) and the TAC promoter.

[0179] The plasmids may optionally include a selectable marker gene or genes that are functional in the host. A selectable marker gene includes any gene that confers a phenotype on bacteria that allows transformed bacterial cells to be identified and selectively grown from among a vast majority of untransformed cells. Suitable selectable marker genes for bacterial hosts, for example, include the ampicillin resistance gene (Amp^{r}), tetracycline resistance gene (Tc^{r}) and the kanamycin resistance gene (Kan^{r}). The kanamycin resistance gene is presently preferred.

[0180] The plasmids may also include DNA encoding a signal for secretion of the operably linked protein. Secretion signals suitable for use are widely available and are well known in the art. Prokaryotic and eukaryotic secretion signals functional in E. coli may be employed. The presently preferred secretion signals include, but are not limited to, those encoded by the following E. coli genes: ompA, ompT, ompF, ompC, beta-lactamase, and alkaline phosphatase, and the like (von Heijne, J. Mol. Biol. 184:99-105, 1985). In addition, the bacterial pelB gene secretion signal (Lei et al., J. Bacteriol. 169:4379, 1987), the phoA secretion signal, and the cek2 functional in insect cell may be employed. The most preferred secretion signal is the E. coli ompA secretion signal. Other prokaryotic and eukaryotic secretion signals known to those of skill in the art may also be employed (see, e.g., von Heijne, J. Mol. Biol. 184:99-105, 1985). Using the methods described herein, one of skill in the art can substitute secretion signals that are functional in either yeast, insect or mammalian cells to secrete proteins from those cells.

[0181] Preferred plasmids for transformation of E. coli cells include the pET expression vectors (e.g., pET-11a, pET-12a-c, pET-15b; see U.S. Pat. No. 4,952,496; available from Novagen, Madison, Wis.). Other preferred plasmids include the pKK plasmids, particularly pKK 223-3, which contains the tac promoter (Brosius et al., Proc. Natl. Acad. Sci. 81:6929, 1984; Ausubel et al., Current Protocols in Molecular Biology; U.S. Pat. Nos. 5,122,463, 5,173,403, 5,187,153, 5,204,254, 5,212,058, 5,212,286, 5,215,907, 5,220,013, 5,223,483, and 5,229,279). Plasmid pKK has been modified by replacement of the ampicillin resistance gene with a kanamycin resistance gene. (Available from Pharmacia; obtained from pUC4K, see, e.g., Vieira et al. (Gene 19:259-268, 1982; and U.S. Pat. No. 4,719,179.) Baculovirus vectors, such as pBlueBac (also called pJVETL and derivatives thereof), particularly pBlueBac III (see, e.g., U.S. Pat. Nos. 5,278,050, 5,244,805, 5,243,041, 5,242,687, 5,266,317, 4,745,051, and 5,169,784; available from Invitrogen, San Diego) may also be used for expression of the polypeptides in insect cells. Other plasmids include the pIN-IIIompA plasmids (see U.S. Pat. No. 4,575,013; see also Duffaud et al., Meth. Enz. 153:492-507, 1987), such as pIN-IIIompA2.

[0182] Preferably, the DNA molecule is replicated in bacterial cells, preferably in E. coli. The preferred DNA molecule also includes a bacterial origin of replication, to ensure the maintenance of the DNA molecule from generation to generation of the bacteria. In this way, large quantities of the DNA molecule can be produced by replication in bacteria. Preferred bacterial origins of replication include, but are not limited to, the fl-ori and col E1 origins of replication. Preferred hosts contain chromosomal copies of DNA encoding T7 RNA polymerase operably linked to an inducible promoter, such as the lacUV promoter (see U.S. Pat. No. 4,952,496). Such hosts include, but are not limited to, lysogens E. coli strains HMS174(DE3)pLysS, BL21(DE3)pLysS, HMS174(DE3) and BL21(DE3). Strain BL21(DE3) is preferred. The pLys strains provide low levels of T7 lysozyme, a natural inhibitor of T7 RNA polymerase.

[0183] The DNA molecules provided may also contain a gene coding for a repressor protein. The repressor protein is capable of repressing the transcription of a promoter that contains sequences of nucleotides to which the repressor protein binds. The promoter can be derepressed by altering the physiological conditions of the cell. For example, the alteration can be accomplished by adding to the growth medium a molecule that inhibits the ability to interact with the operator or with regulatory proteins or other regions of the DNA or by altering the temperature of the growth media. Preferred repressor proteins include, but are not limited to the E. coli lad repressor responsive to IPTG induction, the temperature sensitive λcI857 repressor, and the like. The E. coli lad repressor is preferred.

[0184] In general, recombinant constructs of the subject invention will also contain elements necessary for transcription and translation. In particular, such elements are preferred where the recombinant expression construct containing nucleic acid sequences encoding binding domain-immunoglobulin fusion proteins is intended for expression in a host cell or organism. In certain embodiments of the present invention, cell type preferred or cell type specific expression of a cell binding domain-immunoglobulin fusion encoding gene may be achieved by placing the gene under regulation of a promoter. The choice of the promoter will depend upon the cell type to be transformed and the degree or type of control desired. Promoters can be constitutive or active and may further be cell type specific, tissue specific, individual cell specific, event specific, temporally specific or inducible. Cell-type specific promoters and event type specific promoters are preferred. Examples of constitutive or nonspecific promoters include the SV40 early promoter (U.S. Pat. No. 5,118,627), the SV40 late promoter (U.S. Pat. No. 5,118,627), CMV early gene promoter (U.S. Pat. No. 5,168,062), and adenovirus promoter. In addition to viral promoters, cellular promoters are also amenable within the context of this invention. In particular, cellular promoters for the so-called housekeeping genes are useful. Viral promoters are preferred, because generally they are stronger promoters than cellular promoters. Promoter regions have been identified in the genes of many eukaryotes including higher eukaryotes, such that suitable promoters for use in a particular host can be readily selected by those skilled in the art.

[0185] Inducible promoters may also be used. These promoters include MMTV LTR (PCT WO 91/13160), inducible by dexamethasone; metallothionein promoter, inducible by heavy metals; and promoters with cAMP response elements, inducible by cAMP. By using an inducible promoter, the nucleic acid sequence encoding a binding domain-immunoglobulin fusion protein may be delivered to a cell by the subject invention expression construct and will remain quiescent until the addition of the inducer. This allows further control on the timing of production of the gene product.

[0186] Event-type specific promoters are active or up-regulated only upon the occurrence of an event, such as tumorigenicity or viral infection. The HIV LTR is a well known example of an event-specific promoter. The promoter is inactive unless the tat gene product is present, which occurs upon viral infection. Some event-type promoters are also tissue-specific.

[0187] Additionally, promoters that are coordinately regulated with a particular cellular gene may be used. For example, promoters of genes that are coordinately expressed may be used when expression of a particular binding domain-immunoglobulin fusion protein-encoding gene is desired in concert with expression of one or more additional endogenous or exogenously introduced genes. This type of promoter is especially useful when one knows the pattern of gene expression relevant to induction of an immune response in a particular tissue of the immune system, so that specific immunocompetent cells within that tissue may be activated or otherwise recruited to participate in the immune response.

[0188] In addition to the promoter, repressor sequences, negative regulators, or tissue-specific silencers may be inserted to reduce non-specific expression of binding domain-immunoglobulin fusion protein encoding genes in certain situations, such as, for example, a host that is transiently immunocompromised as part of a therapeutic strategy. Multiple repressor elements may be inserted in the promoter region. Repression of transcription is independent on the orientation of repressor elements or distance from the promoter. One type of repressor sequence is an insulator sequence. Such sequences inhibit transcription (Dunaway et al., Mol Cell Biol 17: 182-9, 1997; Gdula et al., Proc Natl Acad Sci USA 93:9378-83, 1996, Chan et al., J Virol 70: 5312-28, 1996; Scott and Geyer, EMBO J 14:6258-67, 1995; Kalos and Fournier, Mol Cell Biol 15:198-207, 1995; Chung et al., Cell 74: 505-14, 1993) and will silence background transcription.

[0189] Repressor elements have also been identified in the promoter regions of the genes for type II (cartilage) collagen, choline acetyltransferase, albumin (Hu et al., J. Cell Growth Differ. 3(9):577-588, 1992), phosphoglycerate kinase (PGK-2) (Misuno et al., Gene 119(2):293-297, 1992), and in the 6-phosphofructo-2-kinase/fructose-2,6-bisphosphatase gene. (Lemaigre et al., Mol. Cell Biol. 11(2):1099-1106.) Furthermore, the negative regulatory element Tse-1 has been identified in a number of liver specific genes, and has been shown to block cAMP response element- (CRE) mediated induction of gene activation in hepatocytes. (Boshart et al., Cell 61(5):905-916, 1990.)

[0190] In preferred embodiments, elements that increase the expression of the desired product are incorporated into the construct. Such elements include internal ribosome binding sites (IRES; Wang and Siddiqui, Curr. Top. Microbiol. Immunol 203:99, 1995; Ehrenfeld and Semler, Curr. Top. Microbiol. Immunol. 203:65, 1995; Rees et al., Biotechniques 20:102, 1996; Sugimoto et al., Biotechnology 12:694, 1994). IRES increase translation efficiency. As well, other sequences may enhance expression. For some genes, sequences especially at the 5′ end inhibit transcription and/or translation. These sequences are usually palindromes that can form hairpin structures. Any such sequences in the nucleic acid to be delivered are generally deleted. Expression levels of the transcript or translated product are assayed to confirm or ascertain which sequences affect expression. Transcript levels may be assayed by any known method, including Northern blot hybridization, RNase probe protection and the like. Protein levels may be assayed by any known method, including ELISA, western blot, immunocytochemistry or other well known techniques.

[0191] Other elements may be incorporated into the binding domain-immunoglobulin fusion protein encoding constructs of the present invention. In preferred embodiments, the construct includes a transcription terminator sequence, including a polyadenylation sequence, splice donor and acceptor sites, and an enhancer. Other elements useful for expression and maintenance of the construct in mammalian cells or other eukaryotic cells may also be incorporated (e.g., origin of replication). Because the constructs are conveniently produced in bacterial cells, elements that are necessary for, or that enhance, propagation in bacteria are incorporated. Such elements include an origin of replication, a selectable marker and the like.

[0192] As provided herein, an additional level of controlling the expression of nucleic acids encoding binding domain-immunoglobulin fusion proteins delivered to cells using the constructs of the invention may be provided by simultaneously delivering two or more differentially regulated nucleic acid constructs. The use of such a multiple nucleic acid construct approach may permit coordinated regulation of an immune response such as, for example, spatiotemporal coordination that depends on the cell type and/or presence of another expressed encoded component. Those familiar with the art will appreciate that multiple levels of regulated gene expression may be achieved in a similar manner by selection of suitable regulatory sequences, including but not limited to promoters, enhancers and other well known gene regulatory elements.

[0193] The present invention also relates to vectors, and to constructs prepared from known vectors that include nucleic acids of the present invention, and in particular to “recombinant expression constructs” that include any nucleic acids encoding binding domain-immunoglobulin fusion proteins and polypeptides according to the invention as provided above; to host cells which are genetically engineered with vectors and/or constructs of the invention and to methods of administering expression constructs comprising nucleic acid sequences encoding such binding domain-immunoglobulin fusion polypeptides and fusion proteins of the invention, or fragments or variants thereof, by recombinant techniques. Binding domain-immunoglobulin fusion proteins can be expressed in virtually any host cell under the control of appropriate promoters, depending on the nature of the construct (e.g., type of promoter, as described above), and on the nature of the desired host cell (e.g., whether postmitotic terminally differentiated or actively dividing; e.g., whether the expression construct occurs in host cell as an episome or is integrated into host cell genome). Appropriate cloning and expression vectors for use with prokaryotic and eukaryotic hosts are described by Sambrook, et al., Molecular Cloning: A Laboratory Manual, Second Edition, Cold Spring Harbor, N.Y., (1989); as noted above, in particularly preferred embodiments of the invention, recombinant expression is conducted in mammalian cells that have been transfected or transformed with the subject invention recombinant expression construct.

[0194] Typically, the constructs are derived from plasmid vectors. A preferred construct is a modified pNASS vector (Clontech, Palo Alto, Calif.), which has nucleic acid sequences encoding an ampicillin resistance gene, a polyadenylation signal and a T7 promoter site. Other suitable mammalian expression vectors are well known (see, e.g., Ausubel et al., 1995; Sambrook et al., supra; see also, e.g., catalogues from Invitrogen, San Diego, Calif.; Novagen, Madison, Wis.; Pharmacia, Piscataway, N.J.; and others). Presently preferred constructs may be prepared that include a dihydrofolate reductase (DHFR) encoding sequence under suitable regulatory control, for promoting enhanced production levels of the binding domain-immunoglobulin fusion protein, which levels result from gene amplification following application of an appropriate selection agent (e.g., methetrexate).

[0195] Generally, recombinant expression vectors will include origins of replication and selectable markers permitting transformation of the host cell, and a promoter derived from a highly-expressed gene to direct transcription of a downstream structural sequence, as described above. The heterologous structural sequence is assembled in appropriate phase with translation initiation and termination sequences. Thus, for example, the binding domain-immunoglobulin fusion protein encoding nucleic acids as provided herein may be included in any one of a variety of expression vector constructs as a recombinant expression construct for expressing a binding domain-immunoglobulin fusion polypeptide in a host cell. In certain preferred embodiments the constructs are included in formulations that are administered in vivo. Such vectors and constructs include chromosomal, nonchromosomal and synthetic DNA sequences, e.g., derivatives of SV40; bacterial plasmids; phage DNA; yeast plasmids; vectors derived from combinations of plasmids and phage DNA, viral DNA, such as vaccinia, adenovirus, fowl pox virus, and pseudorabies, or replication deficient retroviruses as described below. However, any other vector may be used for preparation of a recombinant expression construct, and in preferred embodiments such a vector will be replicable and viable in the host.

[0196] The appropriate DNA sequence(s) may be inserted into the vector by a variety of procedures. In general, the DNA sequence is inserted into an appropriate restriction endonuclease site(s) by procedures known in the art. Standard techniques for cloning, DNA isolation, amplification and purification, for enzymatic reactions involving DNA ligase, DNA polymerase, restriction endonucleases and the like, and various separation techniques are those known and commonly employed by those skilled in the art. A number of standard techniques are described, for example, in Ausubel et al. (1993 Current Protocols in Molecular Biology, Greene Publ. Assoc. Inc. & John Wiley & Sons, Inc., Boston, Mass.); Sambrook et al. (1989 Molecular Cloning, Second Ed., Cold Spring Harbor Laboratory, Plainview, N.Y.); Maniatis et al. (1982 Molecular Cloning, Cold Spring Harbor Laboratory, Plainview, N.Y.); Glover (Ed.) (1985 DNA Cloning Vol. I and II, IRL Press, Oxford, UK); Hames and Higgins (Eds.), (1985 Nucleic Acid Hybridization, IRL Press, Oxford, UK); and elsewhere.

[0197] The DNA sequence in the expression vector is operatively linked to at least one appropriate expression control sequences (e.g., a constitutive promoter or a regulated promoter) to direct mRNA synthesis. Representative examples of such expression control sequences include promoters of eukaryotic cells or their viruses, as described above. Promoter regions can be selected from any desired gene using CAT (chloramphenicol transferase) vectors or other vectors with selectable markers. Eukaryotic promoters include CMV immediate early, HSV thymidine kinase, early and late SV40, LTRs from retrovirus, and mouse metallothionein-I. Selection of the appropriate vector and promoter is well within the level of ordinary skill in the art, and preparation of certain particularly preferred recombinant expression constructs comprising at least one promoter or regulated promoter operably linked to a nucleic acid encoding an binding domain-immunoglobulin fusion polypeptide is described herein.

[0198] Transcription of the DNA encoding the polypeptides of the present invention by higher eukaryotes may be increased by inserting an enhancer sequence into the vector. Enhancers are cis-acting elements of DNA, usually about from 10 to 300 bp that act on a promoter to increase its transcription. Examples include the SV40 enhancer on the late side of the replication origin by 100 to 270, a cytomegalovirus early promoter enhancer, the polyoma enhancer on the late side of the replication origin, and adenovirus enhancers.

[0199] As provided herein, in certain embodiments the vector may be a viral vector such as a retroviral vector. (Miller et al., 1989 BioTechniques 7:980; Coffin and Varmus, 1996 Retroviruses, Cold Spring Harbor Laboratory Press, NY.) For example, retroviruses from which the retroviral plasmid vectors may be derived include, but are not limited to, Moloney Murine Leukemia Virus, spleen necrosis virus, retroviruses such as Rous Sarcoma Virus, Harvey Sarcoma virus, avian leukosis virus, gibbon ape leukemia virus, human immunodeficiency virus, adenovirus, Myeloproliferative Sarcoma Virus, and mammary tumor virus.

[0200] Retroviruses are RNA viruses which can replicate and integrate into the genome of a host cell via a DNA intermediate. This DNA intermediate, or provirus, may be stably integrated into the host cell DNA. According to certain embodiments of the present invention, an expression construct may comprise a retrovirus into which a foreign gene that encodes a foreign protein is incorporated in place of normal retroviral RNA. When retroviral RNA enters a host cell coincident with infection, the foreign gene is also introduced into the cell, and may then be integrated into host cell DNA as if it were part of the retroviral genome. Expression of this foreign gene within the host results in expression of the foreign protein.

[0201] Most retroviral vector systems which have been developed for gene therapy are based on murine retroviruses. Such retroviruses exist in two forms, as free viral particles referred to as virions, or as proviruses integrated into host cell DNA. The virion form of the virus contains the structural and enzymatic proteins of the retrovirus (including the enzyme reverse transcriptase), two RNA copies of the viral genome, and portions of the source cell plasma membrane containing viral envelope glycoprotein. The retroviral genome is organized into four main regions: the Long Terminal Repeat (LTR), which contains cis-acting elements necessary for the initiation and termination of transcription and is situated both 5′ and 3′ of the coding genes, and the three coding genes gag, pol, and env. These three genes gag, pol, and env encode, respectively, internal viral structures, enzymatic proteins (such as integrase), and the envelope glycoprotein (designated gp70 and p15e) which confers infectivity and host range specificity of the virus, as well as the “R” peptide of undetermined function.

[0202] Separate packaging cell lines and vector producing cell lines have been developed because of safety concerns regarding the uses of retroviruses, including their use in expression constructs as provided by the present invention. Briefly, this methodology employs the use of two components, a retroviral vector and a packaging cell line (PCL). The retroviral vector contains long terminal repeats (LTRs), the foreign DNA to be transferred and a packaging sequence (y). This retroviral vector will not reproduce by itself because the genes which encode structural and envelope proteins are not included within the vector genome. The PCL contains genes encoding the gag, pol, and env proteins, but does not contain the packaging signal “y”. Thus, a PCL can only form empty virion particles by itself. Within this general method, the retroviral vector is introduced into the PCL, thereby creating a vector-producing cell line (VCL). This VCL manufactures virion particles containing only the retroviral vector's (foreign) genome, and therefore has previously been considered to be a safe retrovirus vector for therapeutic use.

[0203] “Retroviral vector construct” refers to an assembly which is, within preferred embodiments of the invention, capable of directing the expression of a sequence(s) or gene(s) of interest, such as binding domain-immunoglobulin fusion encoding nucleic acid sequences. Briefly, the retroviral vector construct must include a 5′ LTR, a tRNA binding site, a packaging signal, an origin of second strand DNA synthesis and a 3′ LTR. A wide variety of heterologous sequences may be included within the vector construct, including for example, sequences which encode a protein (e.g., cytotoxic protein, disease-associated antigen, immune accessory molecule, or replacement gene), or which are useful as a molecule itself (e.g., as a ribozyme or antisense sequence).

[0204] Retroviral vector constructs of the present invention may be readily constructed from a wide variety of retroviruses, including for example, B, C, and D type retroviruses as well as spumaviruses and lentiviruses (see, e.g., RNA Tumor Viruses, Second Edition, Cold Spring Harbor Laboratory, 1985). Such retroviruses may be readily obtained from depositories or collections such as the American Type Culture Collection (“ATCC”; Rockville, Md.), or isolated from known sources using commonly available techniques. Any of the above retroviruses may be readily utilized in order to assemble or construct retroviral vector constructs, packaging cells, or producer cells of the present invention given the disclosure provided herein, and standard recombinant techniques (e.g., Sambrook et al, Molecular Cloning: A Laboratory Manual, 2d ed., Cold Spring Harbor Laboratory Press, 1989; Kunkle, PNAS 82:488, 1985).

[0205] Suitable promoters for use in viral vectors generally may include, but are not limited to, the retroviral LTR; the SV40 promoter; and the human cytomegalovirus (CMV) promoter described in Miller, et al., Biotechniques 7:980-990 (1989), or any other promoter (e.g., cellular promoters such as eukaryotic cellular promoters including, but not limited to, the histone, pol III, and β-actin promoters). Other viral promoters which may be employed include, but are not limited to, adenovirus promoters, thymidine kinase (TK) promoters, and B19 parvovirus promoters. The selection of a suitable promoter will be apparent to those skilled in the art from the teachings contained herein, and may be from among either regulated promoters or promoters as described above.

[0206] As described above, the retroviral plasmid vector is employed to transduce packaging cell lines to form producer cell lines. Examples of packaging cells which may be transfected include, but are not limited to, the PE501, PA317, ψ-2, ψ-AM, PA12, T19-14X, VT-19-17-H2, CRE, ψCRIP, GP+E-86, GP+envAm12, and DAN cell lines as described in Miller, Human Gene Therapy, 1:5-14 (1990). The vector may transduce the packaging cells through any means known in the art. Such means include, but are not limited to, electroporation, the use of liposomes, and CaPO₄ precipitation. In one alternative, the retroviral plasmid vector may be encapsulated into a liposome, or coupled to a lipid, and then administered to a host.

[0207] The producer cell line generates infectious retroviral vector particles which include the nucleic acid sequence(s) encoding the binding domain-immunoglobulin fusion polypeptides or fusion proteins. Such retroviral vector particles then may be employed, to transduce eukaryotic cells, either in vitro or in vivo. The transduced eukaryotic cells will express the nucleic acid sequence(s) encoding the binding domain-immunoglobulin fusion polypeptide or fusion protein. Eukaryotic cells which may be transduced include, but are not limited to, embryonic stem cells, as well as hematopoietic stem cells, hepatocytes, fibroblasts, circulating peripheral blood mononuclear and polymorphonuclear cells including myelomonocytic cells, lymphocytes, myoblasts, tissue macrophages, dendritic cells, Kupffer cells, lymphoid and reticuloendothelia cells of the lymph nodes and spleen, keratinocytes, endothelial cells, and bronchial epithelial cells.

[0208] As another example of an embodiment of the invention in which a viral vector is used to prepare the recombinant binding domain-immunoglobulin fusion expression construct, in one preferred embodiment, host cells transduced by a recombinant viral construct directing the expression of binding domain-immunoglobulin fusion polypeptides or fusion proteins may produce viral particles containing expressed binding domain-immunoglobulin fusion polypeptides or fusion proteins that are derived from portions of a host cell membrane incorporated by the viral particles during viral budding.

[0209] In another aspect, the present invention relates to host cells containing the above described recombinant binding domain-immunoglobulin fusion expression constructs. Host cells are genetically engineered (transduced, transformed or transfected) with the vectors and/or expression constructs of this invention which may be, for example, a cloning vector, a shuttle vector or an expression construct. The vector or construct may be, for example, in the form of a plasmid, a viral particle, a phage, etc. The engineered host cells can be cultured in conventional nutrient media modified as appropriate for activating promoters, selecting transformants or amplifying particular genes such as genes encoding binding domain-immunoglobulin fusion polypeptides or binding domain-immunoglobulin fusion proteins. The culture conditions for particular host cells selected for expression, such as temperature, pH and the like, will be readily apparent to the ordinarily skilled artisan.

[0210] The host cell can be a higher eukaryotic cell, such as a mammalian cell, or a lower eukaryotic cell, such as a yeast cell, or the host cell can be a prokaryotic cell, such as a bacterial cell. Representative examples of appropriate host cells according to the present invention include, but need not be limited to, bacterial cells, such as E. coli, Streptomyces, Salmonella tvphimurium; fungal cells, such as yeast; insect cells, such as Drosophila S2 and Spodoptera S19; animal cells, such as CHO, COS or 293 cells; adenoviruses; plant cells, or any suitable cell already adapted to in vitro propagation or so established de novo. The selection of an appropriate host is deemed to be within the scope of those skilled in the art from the teachings herein.

[0211] Various mammalian cell culture systems can also be employed to express recombinant protein. Examples of mammalian expression systems include the COS-7 lines of monkey kidney fibroblasts, described by Gluzman, Cell 23:175 (1981), and other cell lines capable of expressing a compatible vector, for example, the C127, 3T3, CHO, HeLa and BHK cell lines. Mammalian expression vectors will comprise an origin of replication, a suitable promoter and enhancer, and also any necessary ribosome binding sites, polyadenylation site, splice donor and acceptor sites, transcriptional termination sequences, and 5′ flanking nontranscribed sequences, for example as described herein regarding the preparation of binding domain-immunoglobulin fusion expression constructs. DNA sequences derived from the SV40 splice, and polyadenylation sites may be used to provide the required nontranscribed genetic elements. Introduction of the construct into the host cell can be effected by a variety of methods with which those skilled in the art will be familiar, including but not limited to, for example, calcium phosphate transfection, DEAE-Dextran mediated transfection, or electroporation (Davis et al., 1986 Basic Methods in Molecular Biology).

[0212] The present invention binding domain-immunoglobulin fusion proteins, or compositions comprising one or more polynucleotides encoding same as described herein, (for example, to be administered under conditions and for a time sufficient to permit expression of a binding domain-immunoglobulin fusion protein in a host cell in vivo or in vitro), may be formulated into pharmaceutical compositions for administration according to well known methodologies. Pharmaceutical compositions generally comprise one or more recombinant expression constructs, and/or expression products of such constructs, in combination with a pharmaceutically acceptable carrier, excipient or diluent. Such carriers will be nontoxic to recipients at the dosages and concentrations employed. For nucleic acid-based formulations, or for formulations comprising expression products of the subject invention recombinant constructs, about 0.01 μg/kg to about 100 mg/kg body weight will be administered, typically by the intradermal, subcutaneous, intramuscular or intravenous route, or by other routes. A preferred dosage is about 1 μg/kg to about 1 mg/kg, with about 5 μg/kg to about 200 μg/kg particularly preferred. It will be evident to those skilled in the art that the number and frequency of administration will be dependent upon the response of the host. “Pharmaceutically acceptable carriers” for therapeutic use are well known in the pharmaceutical art, and are described, for example, in Remingtons Pharmaceutical Sciences, Mack Publishing Co. (A. R. Gennaro edit. 1985). For example, sterile saline and phosphate-buffered saline at physiological pH may be used. Preservatives, stabilizers, dyes and even flavoring agents may be provided in the pharmaceutical composition. For example, sodium benzoate, sorbic acid and esters of p-hydroxybenzoic acid may be added as preservatives. Id. at 1449. In addition, antioxidants and suspending agents may be used. Id.

[0213] “Pharmaceutically acceptable salt” refers to salts of the compounds of the present invention derived from the combination of such compounds and an organic or inorganic acid (acid addition salts) or an organic or inorganic base (base addition salts). The compounds of the present invention may be used in either the free base or salt forms, with both forms being considered as being within the scope of the present invention.

[0214] The pharmaceutical compositions that contain one or more binding domain-immunoglobulin fusion protein encoding constructs (or their expressed products) may be in any form which allows for the composition to be administered to a patient. For example, the composition may be in the form of a solid, liquid or gas (aerosol). Typical routes of administration include, without limitation, oral, topical, parenteral (e.g., sublingually or buccally), sublingual, rectal, vaginal, and intranasal. The term parenteral as used herein includes subcutaneous injections, intravenous, intramuscular, intrasternal, intracavernous, intrathecal, intrameatal, intraurethral injection or infusion techniques. The pharmaceutical composition is formulated so as to allow the active ingredients contained therein to be bioavailable upon administration of the composition to a patient. Compositions that will be administered to a patient take the form of one or more dosage units, where for example, a tablet may be a single dosage unit, and a container of one or more compounds of the invention in aerosol form may hold a plurality of dosage units.

[0215] For oral administration, an excipient and/or binder may be present. Examples are sucrose, kaolin, glycerin, starch dextrins, sodium alginate, carboxymethylcellulose and ethyl cellulose. Coloring and/or flavoring agents may be present. A coating shell may be employed.

[0216] The composition may be in the form of a liquid, e.g., an elixir, syrup, solution, emulsion or suspension. The liquid may be for oral administration or for delivery by injection, as two examples. When intended for oral administration, preferred compositions contain, in addition to one or more binding domain-immunoglobulin fusion construct or expressed product, one or more of a sweetening agent, preservatives, dye/colorant and flavor enhancer. In a composition intended to be administered by injection, one or more of a surfactant, preservative, wetting agent, dispersing agent, suspending agent, buffer, stabilizer and isotonic agent may be included.

[0217] A liquid pharmaceutical composition as used herein, whether in the form of a solution, suspension or other like form, may include one or more of the following adjuvants: sterile diluents such as water for injection, saline solution, preferably physiological saline, Ringer's solution, isotonic sodium chloride, fixed oils such as synthetic mono or digylcerides which may serve as the solvent or suspending medium, polyethylene glycols, glycerin, propylene glycol or other solvents; antibacterial agents such as benzyl alcohol or methyl paraben; antioxidants such as ascorbic acid or sodium bisulfite; chelating agents such as ethylenediaminetetraacetic acid; buffers such as acetates, citrates or phosphates and agents for the adjustment of tonicity such as sodium chloride or dextrose. The parenteral preparation can be enclosed in ampoules, disposable syringes or multiple dose vials made of glass or plastic. Physiological saline is a preferred adjuvant. An injectable pharmaceutical composition is preferably sterile.

[0218] It may also be desirable to include other components in the preparation, such as delivery vehicles including but not limited to aluminum salts, water-in-oil emulsions, biodegradable oil vehicles, oil-in-water emulsions, biodegradable microcapsules, and liposomes. Examples of immunostimulatory substances (adjuvants) for use in such vehicles include N-acetylmuramyl-L-alanine-D-isoglutamine (MDP), lipopoly-saccharides (LPS), glucan, IL-12, GM-CSF, gamma interferon and IL-15.

[0219] While any suitable carrier known to those of ordinary skill in the art may be employed in the pharmaceutical compositions of this invention, the type of carrier will vary depending on the mode of administration and whether a sustained release is desired. For parenteral administration, such as subcutaneous injection, the carrier preferably comprises water, saline, alcohol, a fat, a wax or a buffer. For oral administration, any of the above carriers or a solid carrier, such as mannitol, lactose, starch, magnesium stearate, sodium saccharine, talcum, cellulose, glucose, sucrose, and magnesium carbonate, may be employed. Biodegradable microspheres (e.g., polylactic galactide) may also be employed as carriers for the pharmaceutical compositions of this invention. Suitable biodegradable microspheres are disclosed, for example, in U.S. Pat. Nos. 4,897,268 and 5,075,109. In this regard, it is preferable that the microsphere be larger than approximately 25 microns.

[0220] Pharmaceutical compositions may also contain diluents such as buffers, antioxidants such as ascorbic acid, low molecular weight (less than about 10 residues) polypeptides, proteins, amino acids, carbohydrates including glucose, sucrose or dextrins, chelating agents such as EDTA, glutathione and other stabilizers and excipients. Neutral buffered saline or saline mixed with nonspecific serum albumin are exemplary appropriate diluents. Preferably, product is formulated as a lyophilizate using appropriate excipient solutions (e.g., sucrose) as diluents.

[0221] As described above, the subject invention includes compositions capable of delivering nucleic acid molecules encoding binding domain-immunoglobulin fusion proteins. Such compositions include recombinant viral vectors (e.g., retroviruses (see WO 90/07936, WO 91/02805, WO 93/25234, WO 93/25698, and WO 94/03622), adenovirus (see Berkner, Biotechniques 6:616-627, 1988; Li et al., Hum. Gene Ther. 4:403-409, 1993; Vincent et al., Nat. Genet. 5:130-134, 1993; and Kolls et al., Proc. Natl. Acad. Sci. USA 91:215-219, 1994), pox virus (see U.S. Pat. No. 4,769,330; U.S. Pat. No. 5,017,487; and WO 89/01973)), recombinant expression construct nucleic acid molecules complexed to a polycationic molecule (see WO 93/03709), and nucleic acids associated with liposomes (see Wang et al., Proc. Natl. Acad. Sci. USA 84:7851, 1987). In certain embodiments, the DNA may be linked to killed or inactivated adenovirus (see Curiel et al., Hum. Gene Ther. 3:147-154, 1992; Cotton et al., Proc. Natl. Acad. Sci. USA 89:6094, 1992). Other suitable compositions include DNA-ligand (see Wu et al., J. Biol. Chem. 264:16985-16987, 1989) and lipid-DNA combinations (see Felgner et al., Proc. Natl. Acad. Sci. USA 84:7413-7417, 1989).

[0222] In addition to direct in vivo procedures, ex vivo procedures may be used in which cells are removed from a host, modified, and placed into the same or another host animal. It will be evident that one can utilize any of the compositions noted above for introduction of binding domain-immunoglobulin fusion proteins or of binding domain-immunoglobulin fusion protein encoding nucleic acid molecules into tissue cells in an ex vivo context. Protocols for viral, physical and chemical methods of uptake are well known in the art.

[0223] Accordingly, the present invention is useful for treating a patient having a B-cell disorder or a malignant condition, or for treating a cell culture derived from such a patient. As used herein, the term “patient” refers to any warm-blooded animal, preferably a human. A patient may be afflicted with cancer or a malignant condition, such as B-cell lymphoma, or may be normal (i.e., free of detectable disease and infection). A “cell culture” includes any preparation amenable to ex vivo treatment, for example a preparation containing immunocompetent cells or isolated cells of the immune system (including, but not limited to, T cells, macrophages, monocytes, B cells and dendritic cells). Such cells may be isolated by any of a variety of techniques well known to those of ordinary skill in the art (e.g., Ficoll-hypaque density centrifugation). The cells may (but need not) have been isolated from a patient afflicted with a B-cell disorder or a malignant condition, and may be reintroduced into a patient after treatment.

[0224] A liquid composition intended for either parenteral or oral administration should contain an amount of binding domain-immunoglobulin fusion protein encoding construct or expressed product such that a suitable dosage will be obtained. Typically, this amount is at least 0.01 wt % of a binding domain-immunoglobulin fusion construct or expressed product in the composition. When intended for oral administration, this amount may be varied to be between 0.1 and about 70% of the weight of the composition. Preferred oral compositions contain between about 4% and about 50% of binding domain-immunoglobulin fusion construct or expressed product(s). Preferred compositions and preparations are prepared so that a parenteral dosage unit contains between 0.01 to 1% by weight of active compound.

[0225] The pharmaceutical composition may be intended for topical administration, in which case the carrier may suitably comprise a solution, emulsion, ointment or gel base. The base, for example, may comprise one or more of the following: petrolatum, lanolin, polyethylene glycols, beeswax, mineral oil, diluents such as water and alcohol, and emulsifiers and stabilizers. Thickening agents may be present in a pharmaceutical composition for topical administration. If intended for transdermal administration, the composition may include a transdermal patch or iontophoresis device. Topical formulations may contain a concentration of the binding domain-immunoglobulin fusion construct or expressed product of from about 0.1 to about 10% w/v (weight per unit volume).

[0226] The composition may be intended for rectal administration, in the form, e.g., of a suppository which will melt in the rectum and release the drug. The composition for rectal administration may contain an oleaginous base as a suitable nonirritating excipient. Such bases include, without limitation, lanolin, cocoa butter and polyethylene glycol.

[0227] In the methods of the invention, the binding domain-immunoglobulin fusion encoding constructs or expressed product(s) may be administered through use of insert(s), bead(s), timed-release formulation(s), patch(es) or fast-release formulation(s).

[0228] The following Examples are offered by way of illustration and not by way of limitation.

### EXAMPLES

### Example 1

### Cloning of the 2H7 Variable Regions and Construction and Sequencing of 2H7scFv-Ig

[0229] This Example illustrates the cloning of cDNA molecules that encode the heavy chain and light chain variable regions of the monoclonal antibody 2H7. This Example also demonstrates the construction, sequencing, and expression of 2H7scFv-Ig.

[0230] Hybridoma cells expressing 2H7 monoclonal antibody that specifically bound to CD20 were provided by Ed Clark at the University of Washington, Seattle, Wash. Prior to harvesting, hybridoma cells were kept in log phase growth for several days in RPMI 1640 media Invitrogen/Life Technologies, Gaithersburg, Md.) supplemented with glutamine, pyruvate, DMEM non-essential amino acids, and penicillin-streptomycin. Cells were pelleted by centrifugation from the culture medium, and 2×10⁷ cells were used to prepare RNA. RNA was isolated from the 2H7-producing hybridoma cells using the Pharmingen (San Diego, Calif.) total RNA isolation kit (Catalog #45520K) according to the manufacturer's instructions accompanying the kit. One microgram (1 μg) of total RNA was used as template to prepare cDNA by reverse transcription. The RNA and 300 ng random primers were combined and denatured at 72° C. for 10 minutes prior to addition of enzyme. Superscript II reverse transcriptase (Life Technologies) was added to the RNA plus primer mixture in a total volume of 25 μl in the presence of 5× second strand buffer and 0.1 M DTT provided with the enzyme. The reverse transcription reaction was allowed to proceed at 42° C. for one hour.

[0231] The 2H7 cDNA generated in the randomly primed reverse transcriptase reaction and V region specific primers were used to amplify by PCR the variable regions for the light and heavy chain of the 2H7 antibody. The V region specific primers were designed using the published sequence (Genbank accession numbers M17954 for V_{L} and M17953 for V_{H}) as a guide. The two variable chains were designed with compatible end sequences so that an scFv could be assembled by ligation of the two V regions after amplification and restriction enzyme digestion.

[0232] A (gly₄ser)₃ peptide linker to be inserted between the two V regions was incorporated by adding the extra nucleotides to the antisense primer for the V_{L} of 2H7. A Sac I restriction site was also introduced at the junction between the two V regions. The sense primer used to amplify the 2H7 V_{L}, that included a HindIII restriction site and the light chain leader peptide was 5′-gtc aag ctt gcc gcc atg gat ttt caa gtg cag att ttt cag c-3′ (SEQ ID NO: 23). The antisense primer was 5′-gtc gtc gag ctc cca cct cct cca gat cca cca ccg ccc gag cca ccg cca cct ttc agc tcc agc ttg gtc cc-3′ (SEQ ID NO: 24). The reading frame of the V region is indicated as a bold, underlined codon. The Hind III and Sad sites are indicated by underlined italicized sequences.

[0233] The V_{H} domain was amplified without a leader peptide, but included a 5′ Sad restriction site for fusion to the V_{L} and a BclI restriction site at the 3′ end for fusion to various tails, including the human IgG1 Fc domain and the truncated forms of CD40 ligand, CD154. The sense primer was 5′-gct gct gag ctc tca ggc tta tct aca gca agt ctg g-3′ (SEQ ID NO: 25). The Sad site is indicated in italicized and underlined font, and the reading frame of the codon for the first amino acid of the V_{H} domain is indicated in bold, underlined type. The antisense primer was 5′-gtt gtc tga tca gag acg gtg acc gtg gtc cc-3′ (SEQ ID NO: 26). The BclI site is indicated in italicized, underlined type, and the last serine of the V_{H} domain sequence is indicated in bold, underlined type.

[0234] The scFv-Ig was assembled by inserting the 2H7 scFv HindIII-BclI fragment into pUC19 containing the human IgG1 hinge, CH2, and CH3 regions, which was digested with restriction enzymes, HindIII and BclI. After ligation, the ligation products were transformed into DH5α bacteria. Positive clones were screened for the properly inserted fragments using the Sad site at the V_{L}-V_{H} junction of 2H7 as a diagnostic site. The 2H7scFv-Ig cDNA was subjected to cycle sequencing on a PE 9700 thermocycler using a 25-cycle program by denaturing at 96° C. for 10 seconds, annealing at 50° C. for 30 seconds, and extending at 72° C. for 4 minutes. The sequencing primers were pUC forward and reverse primers and an internal primer that annealed to the CH2 domain human in the IgG constant region portion. Sequencing reactions were performed using the Big Dye Terminator Ready Sequencing Mix (PE-Applied Biosystems, Foster City, Calif.) according to the manufacturer's instructions. Samples were subsequently purified using Centrisep columns (Catalog #CS-901, Princeton Separations, Adelphia, N.J.), the eluates dried in a Savant vacuum dryer, denatured in Template Suppression Reagent (PE-ABI), and analyzed on an ABI 310 Genetic Analyzer (PE-Applied Biosystems). The sequence was edited, translated, and analyzed using Vector Nti version 6.0 (Informax, North Bethesda, Md.). FIG. 1 shows the cDNA and predicted amino acid sequence of the 2H7scFv-Ig construct.

### Example 2

### Expression of 2H7 scFv-Ig in Stable CHO Cell Lines

[0235] This Example illustrates expression of 2H7scFv-Ig in a eukaryotic cell line and characterization of the expressed 2H7scFv-Ig by SDS-PAGE and by functional assays, including ADCC and complement fixation.

[0236] The 2H7scFv-Ig HindIII-XbaI (−1.6 kb) fragment with correct sequence was inserted into the mammalian expression vector pD18, and DNA from positive clones was amplified using QIAGEN plasmid preparation kits (QIAGEN, Valencia, Calif.). The recombinant plasmid DNA (100 ng) was then linearized in a nonessential region by digestion with AscI, purified by phenol extraction, and resuspended in tissue culture media, Excell 302 (Catalog #14312-79P, JRH Biosciences, Lenexa, Kans.). Cells for transfection, CHO DG44 cells, were kept in logarithmic growth, and 10⁷ cells harvested for each transfection reaction. Linearized DNA was added to the CHO cells in a total volume of 0.8 ml for electroporation.

[0237] Stable production of the 2H7 scFv-Ig fusion protein (SEQ. ID NO:10) was achieved by electroporation of a selectable, amplifiable plasmid, pD18, containing the 2H7 scFv-Ig cDNA under the control of the CMV promoter, into Chinese Hamster Ovary (CHO) cells (all cell lines from American Type Culture Collection, Manassas, Va., unless otherwise noted). The 2H7 expression cassette was subcloned downstream of the CMV promoter into the vector multiple cloning site as a ˜1.6 kb HindIII-XbaI fragment. The pD18 vector is a modified version of pcDNA3 encoding the DHFR selectable marker with an attenuated promoter to increase selection pressure for the plasmid. Plasmid DNA was prepared using Qiagen maxiprep kits, and purified plasmid was linearized at a unique AscI site prior to phenol extraction and ethanol precipitation. Salmon sperm DNA (Sigma-Aldrich, St. Louis, Mo.) was added as carrier DNA, and 100 ng each of plasmid and carrier DNA was used to transfect 10⁷ CHO DG44 cells by electroporation. Cells were grown to logarithmic phase in Excell 302 media (JRH Biosciences) containing glutamine (4 mM), pyruvate, recombinant insulin, penicillin-streptomycin, and 2×DMEM nonessential amino acids (all from Life Technologies, Gaithersburg, Md.), hereafter referred to as “Excell 302 complete” media. Media for untransfected cells also contained HT (diluted from a 100× solution of hypoxanthine and thymidine) (Invitrogen/Life Technologies). Media for transfections under selection contained varying levels of methotrexate (Sigma-Aldrich) as selective agent, ranging from 50 nM to 5 μM. Electroporations were performed at 275 volts, 950 μF. Transfected cells were allowed to recover overnight in non-selective media prior to selective plating in 96 well flat bottom plates (Costar) at varying serial dilutions ranging from 125 cells/well to 2000 cells/well. Culture media for cell cloning was Excell 302 complete, containing 100 nM methotrexate. Once clonal outgrowth was sufficient, serial dilutions of culture supernatants from master wells were screened for binding to CD20-CHO transfected cells. The clones with the highest production of the fusion protein were expanded into T25 and then T75 flasks to provide adequate numbers of cells for freezing and for scaling up production of the 2H7scFvIg. Production levels were further increased in cultures from three clones by progressive amplification in methotrexate containing culture media. At each successive passage of cells, the Excell 302 complete media contained an increased concentration of methotrexate, such that only the cells that amplified the DHFR plasmid could survive.

[0238] Supernatants were collected from CHO cells expressing the 2H7scFv-Ig, filtered through 0.2 μm PES express filters (Nalgene, Rochester, N.Y.) and were passed over a Protein A-agarose (IPA 300 crosslinked agarose) column (Repligen, Needham, Mass.). The column was washed with PBS, and then bound protein was eluted using 0.1 M citrate buffer, pH 3.0. Fractions were collected and eluted protein was neutralized using 1M Tris, pH 8.0, prior to dialysis overnight in PBS. Concentration of the purified 2H7scFv-Ig (SEQ ID NOs: 1 and 11) was determined by absorption at 280 nm. An extinction coefficient of 1.77 was determined using the protein analysis tools in the Vector Nti Version 6.0 Software package (Informax, North Bethesda, Md.). This program uses the amino acid composition data to calculate extinction coefficients.

[0239] Production levels of 2H7scFv-Ig by transfected, stable CHO cells were analyzed by flow cytometry. Purified 2H7scFv-Ig to CHO cells was allowed to bind to CHO cells that expressed CD20 (CD20 CHO) and analyzed by flow cytometry using a fluorescein-conjugated anti-human IgG second step reagent (Catalog Numbers H10101 and H10501, CalTag, Burlingame, Calif.). FIG. 2 (top) shows a standard curve generated by titration of 2H7scFv-Ig binding to CD20 CHO. At each concentration of 2H7scFv-Ig, the mean brightness of the fluorescein signal in linear units is shown. Supernatants collected from T flasks containing stable CHO cell clones expressing 2H7scFv-Ig were then allowed to bind to CD20 CHO and the binding was analyzed by flow cytometry. The fluorescein signal generated by 2H7scFv-Ig contained in the supernatants was measured and the 2H7scFv-Ig concentration in the supernatants was calculated from the standard curve (FIG. 2, bottom).

[0240] Purified 2H7scFv-Ig (SEQ ID NOs: 1 and 11) was analyzed by electrophoresis on SDS-Polyacrylamide gels. Samples of 2H7scFv-Ig, purified by independent Protein A Agarose column runs, were boiled in SDS sample buffer without reduction of disulfide bonds and applied to SDS 10% Tris-BIS gels (Catalog #NP0301, Novex, Carlsbad, Calif.). Twenty micrograms of each purified batch was loaded on the gels. The proteins were visualized after electrophoresis by Coomassie Blue staining (Pierce Gel Code Blue Stain Reagent, Catalog #24590, Pierce, Rockford, Ill.), and destaining in distilled water. Molecular weight markers were included on the same gel (Kaleidoscope Prestained Standards, Catalog #161-0324, Bio-Rad, Hercules, Calif.). The results are presented in FIG. 3. The numbers above the lanes designate independent purification batches. The molecular weights in kilodaltons of the size markers are indicated on the left side of the figure. Further experiments with alternative sample preparation conditions indicated that reduction of disulfide bonds by boiling the protein in SDS sample buffer containing DTT or 2-mercaptoethanol caused the 2H7scFv-Ig to aggregate.

[0241] Any number of other immunological parameters may be monitored using routine assays that are well known in the art. These may include, for example, antibody dependent cell-mediated cytotoxicity (ADCC) assays, secondary in vitro antibody responses, flow immunocytofluorimetric analysis of various peripheral blood or lymphoid mononuclear cell subpopulations using well established marker antigen systems, immunohistochemistry or other relevant assays. These and other assays may be found, for example, in Rose et al. (Eds.), Manual of Clinical Laboratory Immunology, 5^{th} Ed., 1997 American Society of Microbiology, Washington, D.C.

[0242] The ability of 2H7scFv-Ig to kill CD20 positive cells in the presence of complement was tested using B cell lines Ramos and Bjab. Rabbit complement (Pel-Freez, Rogers, Ak.) was used in the assay at a final dilution of 1/10. Purified 2H7scFv-Ig was incubated with B cells and complement for 45 minutes at 37° C., followed by counting of live and dead cells by trypan blue exclusion. The results in FIG. 4A show that in the presence of rabbit complement, 2H7scFv-Ig lysed B cells expressing CD20.

[0243] The ability of 2H7scFv-Ig to kill CD20 positive cells in the presence of peripheral blood mononuclear cells (PBMC) was tested by measuring the release of ⁵¹Cr from labeled Bjab cells in a 4-hour assay using a 100:1 ratio of PBMC to Bjab cells. The results shown in FIG. 4B indicated that 2H7scFv-Ig can mediate antibody dependent cellular cytotoxicity (ADCC) because the release of ⁵¹Cr was higher in the presence of both PBMC and 2H7scFv-Ig than in the presence of either PBMC or 2H7scFv-Ig alone.

### Example 3

### Effect of Simultaneous Ligation of CD20 and CD40 on Growth of Normal B Cells, and on CD95 Expression, and Induction of Apoptosis

[0244] This example illustrates the effect of cross-linking of CD20 and CD40 expressed on the cell surface on cell proliferation.

[0245] Dense resting B cells were isolated from human tonsil by a Percoll step gradient and T cells were removed by E-rosetting. Proliferation of resting, dense tonsillar B cells was measured by uptake of ³[H]-thymidine during the last 12 hours of a 4-day experiment. Proliferation was measured in quadruplicate cultures with means and standard deviations as shown. Murine anti-human CD20 mAb 1F5 (anti-CD20) was used alone or was cross-linked with anti-murine K mAb 187.1 (anti-CD20XL). CD40 activation was accomplished using soluble human CD154 fused with murine CD8 (CD154) (Hollenbaugh et al., EMBO J. 11: 4212-21 (1992)), and CD40 cross-linking was accomplished using anti-murine CD8 mAb 53-6 (CD154XL). This procedure allowed simultaneous cross-linking of CD20 and CD40 on the cell surface. The results are presented in FIG. 5.

[0246] The effect of CD20 and CD40 cross-linking on Ramos cells, a B lymphoma cell line, was examined. Ramos cells were analyzed for CD95 (Fas) expression and percent apoptosis eighteen hours after treatment (no goat anti-mouse IgG (GAM)) and/or cross-linking (+GAM) using murine mAbs that specifically bind CD20 (1F5) and CD40 (G28-5). Control cells were treated with a non-binding isotype control (64.1) specific for CD3.

[0247] Treated Ramos cells were harvested, incubated with FITC-anti-CD95, and analyzed by flow cytometry to determine the relative expression level of Fas on the cell surface after CD20 or CD40 cross-linking Data is plotted as mean fluorescence of cells after treatment with the stimuli indicated (FIG. 6A).

[0248] Treated Ramos cells from the same experiment were harvested and binding of annexin V was measured to indicate the percentage apoptosis in the treated cultures. Apoptosis was measured by binding of Annexin V 18 hours after cross-linking of CD20 and CD40 using 1F5 and G28-5 followed by cross-linking with GAM. Binding of Annexin V was measured using a FITC-Annexin V kit (Catalog #PN-IM2376, Immunotech, Marseille, France,) Annexin V binding is known to be an early event in progression of cells into apoptosis. Apoptosis, or programmed cell death, is a process characterized by a cascade of catabolic reactions leading to cell death by suicide. In the early phase of apoptosis, before cells change morphology and hydrolyze DNA, the integrity of the cell membrane is maintained but cells lose the asymmetry of their membrane phospholipids, exposing negatively charged phospholipids, such as phosphatidylserine, at the cell surface. Annexin V, a calcium and phospholipid binding protein, binds preferentially and with high affinity to phosphatidylserine. Results demonstrating the effect of cross-linking both CD20 and CD40 on expression of the FAS receptor (CD95) are presented in FIG. 6B. The effect of cross-linking of both CD20 and CD40 on Annexin V binding to cells is shown in FIG. 6B.

### Example 4

### Construction and Characterization of 2H7 scFv-CD154 Fusion Proteins

[0249] To construct a molecule capable of binding to both CD20 and CD40, cDNA encoding the 2H7 scFv was fused with cDNA encoding CD154, the CD40 ligand. The 2H7 scFv cDNA encoded on the HindIII-BclI fragment was removed from the 2H7 scFvIg construct, and inserted into a pD18 vector along with a BamHI-XbaI cDNA fragment encoding the extracellular domain of human CD154. The extracellular domain is encoded at the carboxy terminus of CD154, similar to other type II membrane proteins.

[0250] The extracellular domain of human CD154 was PCR amplified using cDNA generated with random primers and RNA from human T lymphocytes activated with PHA (phytohemagglutinin). The primer sets included two different 5′ or sense primers that created fusion junctions at two different positions within the extracellular domain of CD154. Two different fusion junctions were designed that resulted in a short or truncated form (form S4) including amino acids 108 (Glu)-261 (Leu)+(Glu), and a long or complete form (form L2) including amino acids 48 (Arg)-261 (Leu)+(Glu), of the extracellular domain of CD154, both constructed as BamHI-XbaI fragments. The sense primer which fuses the two different truncated extracellular domains to the 2H7scFv includes a BamHI site for cloning. The sense primer for the S4 form of the CD154 cDNA is designated CD154BAM108 and encodes a 34 mer with the following sequence: 5′-gtt gtc gga tcc aga aaa cag ctt tga aat gca a-3′ (SEQ ID NO: 27), while the antisense primer is designated CD154XBA and encodes a 44 mer with the following sequence: 5′-gtt gtt tct aga tta tca ctc gag ttt gag taa gcc aaa gga cg-3′ (SEQ ID NO: 28).

[0251] The oligonucleotide primers used in amplifying the long form (L2) of the CD154 extracellular domain encoding amino acids 48 (Arg)-261 (Leu)+(Glu), were as follows: The sense primer designated CD154 BAM48 encoded a 35-mer with the following sequence: 5′-gtt gtc gga tcc aag aag gtt gga caa gat aga ag-3″(SEQ ID NO: 29). The antisense primer designated CD154XBA encoded the 44-mer: 5′-gtt gtt tct aga tta tca ctc gag ttt gag taa gcc aaa gga cg-3′ (SEQ ID NO: 28). Other PCR reaction conditions were identical to those used for amplifying the 2H7 scFv (see Example 1). PCR fragments were purified by PCR quick kits (QIAGEN, San Diego, Calif.), eluted in 30 μl ddH₂O, and digested with BamHI and XbaI (Roche) restriction endonucleases in a 40 μl reaction volume at 37° C. for 3 hours. Fragments were gel purified, purified using QIAEX kits according to the manufacturer's instructions (QIAGEN), and ligated along with the 2H7 HindIII-BclI fragment into the pD18 expression vector digested with HindIII+XbaI. Ligation reactions were transformed into DH5-alpha chemically competent bacteria and plated onto LB plates containing 100 μg/ml ampicillin. Transformants were grown overnight at 37° C., and isolated colonies used to inoculate 3 ml liquid cultures in Luria Broth containing 100 μg/ml ampicillin. Clones were screened after mini-plasmid preparations (QIAGEN) for insertion of both the 2H7 scFv and the CD154 extracellular domain fragments.

[0252] The 2H7scFv-CD154 construct cDNAs were subjected to cycle sequencing on a PE 9700 thermocycler using a 25-cycle program that included denaturating at 96° C., 10 seconds, annealing at 50° C. for 5 seconds, and extension at 60° C., for 4 minutes. The sequencing primers used were pD18 forward (SEQ ID NO: 30: 5′-gtctatataagcagagctctggc-3′) and pD18 reverse (SEQ ID NO: 31: 5′-cgaggctgatcagcgagctctagca-3′) primers. In addition, an internal primer was used that had homology to the human CD154 sequence (SEQ ID NO: 32: 5′-ccgcaatttgaggattctgatcacc-3′). Sequencing reactions included primers at 3.2 pmol, approximately 200 ng DNA template, and 8 μl sequencing mix. Sequencing reactions were performed using the Big Dye Terminator Ready Sequencing Mix (PE-Applied Biosystems, Foster City, Calif.) according to the manufacturer's instructions. Samples were subsequently purified using Centrisep columns (Princeton Separations, Adelphia, N.J.). The eluates were dried in a Savant speed-vacuum dryer, denatured in 20 μl template Suppression Reagent (ABI) at 95° C. for 2 minutes, and analyzed on an ABI 310 Genetic Analyzer (PE-Applied Biosystems). The sequence was edited, translated, and analyzed using Vector Nti version 6.0 (Informax, North Bethesda, Md.). The 2H7scFv-CD154 L2 cDNA sequence (SEQ ID NOs: 21 and 149) and predicted amino acid sequence (SEQ ID NOs: 33 and 150) is presented in FIG. 7A, and 2H7scFv-CD154 S4 cDNA sequence (SEQ ID NOs: 22 and 151) and predicted amino acid sequence (SEQ ID NOs: 34 and 152) is presented in FIG. 7B.

[0253] The binding activity of the 2H7 scFv-CD154 fusion proteins (SEQ ID NOS: 33, 150 and 34, 152) to CD20 and CD40 simultaneously was determined by flow cytometry. The assay used CHO cell targets that express CD20. After a 45-minute incubation of CD20 CHO cells with supernatants from cells transfected with the 2H7 scFv-CD154 expression plasmid, the CD20 CHO cells were washed twice and incubated with biotin-conjugated CD40-Ig fusion protein in PBS/2% FBS. After 45 min, cells were washed twice and incubated with phycoerythrin (PE)-labeled strepavidin at 1:100 in PBS/2% FBS (Molecular Probes, Eugene Oreg.). After an additional 30 min incubation, cells were washed 2× and were analyzed by flow cytometry. The results show that the 2H7 scFv-CD154 molecule was able to bind to CD20 on the cell surface and to capture biotin-conjugated CD40 from solution (FIG. 8).

[0254] To determine the effect of the 2H7scFv-CD154 on growth and viability of B lymphoma and lymphoblastoid cell lines, cells were incubated with 2H7scFv-CD154 L2 (SEQ. ID NO: 33, 150) for 12 hours and then examined for binding of Annexin V. Binding of Annexin V was measured using a FITC-Annexin V kit (Immunotech, Marseille, France, Catalog #PN-IM2376). B cell lines were incubated in 1 ml cultures with dilutions of concentrated, dialyzed supernatants from cells expressing secreted forms of the 2H7scFv-CD154 fusion proteins. The results are presented in FIG. 9.

[0255] The growth rate of the Ramos B lymphoma cell line in the presence of 2H7scFv-CD154 was examined by uptake of ³H-thymidine for the last 6 hours of a 24-hour culture. The effect of 2H7scFv-CD154 on cell proliferation is shown in FIG. 10.

### Example 5

### Construction and Characterization of CytoxB Antibody Derivatives

[0256] CytoxB antibodies were derived from the 2H7 scFv-IgG polypeptide. The 2H7 scFv (see Example 1) was linked to the human IgG1 Fc domain via an altered hinge domain (see FIG. 11). Cysteine residues in the hinge region were substituted with serine residues by site-directed mutagenesis and other methods known in the art. The mutant hinge was fused either to a wild-type Fc domain to create one construct, designated CytoxB-MHWTG1C, or was fused to a mutated Fc domain (CytoxB-MHMG1C) that had additional mutations introduced into the CH2 domain. Amino acid residues in CH2 that are implicated in effector function are illustrated in FIG. 11. Mutations of one or more of these residues may reduce FcR binding and mediation of effector functions. In this example, the leucine residue 234 known in the art to be important to Fc receptor binding, was mutated in the 2H7 scFv fusion protein, CytoxB-[MG1H/MG1C]. In another construct, the human IgG1 hinge region was substituted with a portion of the human IgA hinge, which was fused to wild-type human Fc domain (CytoxB-IgAHWTHG1C). (See FIG. 11.) This mutated hinge region allows expression of a mixture of monomeric and dimeric molecules that retain functional properties of the human IgG1 CH2 and CH3 domains. Synthetic, recombinant cDNA expression cassettes for these molecules were constructed and polypeptides were expressed in CHODG44 cells according to methods described in Example 2.

[0257] Purified fusion protein derivatives of CytoxB-scFvIg molecules were analyzed by SDS-PAGE according to the methods described in Example 2. Polyacrylamide gels were run under non-reducing and reducing conditions. Two different molecule weight marker sets, BioRad prestained markers, (BioRad, Hercules, Calif.) and Novex Multimark molecular weight markers were loaded onto each gel. The migration patterns of the different constructs and of Rituximab™ are presented in FIG. 12.

[0258] The ability of the different derivatives of CytoxB-scFvIg molecules to mediate ADCC was measured using the Bjab B lymphoma cells as the target and freshly prepared human PBMCs as effector cells. (See Example 2.) Effector to target ratios were varied as follows: 70:1, 35:1, and 18:1, with the number of Bjab cells per well remaining constant but the number of PBMCs were varied. Bjab cells were labeled for 2 hours with ⁵¹Cr and aliquoted at a cell density of 5×10⁴ cells/well to each well of flat-bottom 96 well plates. Purified fusion proteins or rituximab were added at a concentration of 10 μg/ml to the various dilutions of PBMCs. Spontaneous release was measured without addition of PBMC or fusion protein, and maximal release was measured by the addition of detergent (1% NP-40) to the appropriate wells. Reactions were incubated for 4 hours, and 100 μl of culture supernatant was harvested to a Lumaplate (Packard Instruments) and allowed to dry overnight prior to counting cpm released. The results are presented in FIG. 13.

[0259] Complement dependent cytotoxicity (CDC) activity of the CytoxB derivatives was also measured. Reactions were performed essentially as described in Example 2. The results are presented in FIG. 14 as percent of dead cells to total cells for each concentration of fusion protein.

### Example 6

### In Vivo Studies in Macaques

[0260] Initial in vivo studies with CytoxB derivatives have been performed in nonhuman primates. FIG. 15 shows data characterizing the serum half-life of CytoxB in monkeys. Measurements were performed on serum samples obtained from two different macaques (J99231 and K99334) after doses of 6 mg/kg were administered to each monkey on the days indicated by arrows. For each sample, the level of 2H7scFvIg present was estimated by comparison to a standard curve generated by binding of purified CytoxB-(MHWTG1C)-Ig fusion protein to CD20 CHO cells (see Example 2). The data are tabulated in the bottom panel of the FIG. 15.

[0261] The effect of CytoxB-(MHWTG1C)Ig fusion protein on levels of circulating CD40+ cells in macaques was investigated. Complete blood counts were performed at each of the days indicated in FIG. 16. In addition, FACS (fluorescence activated cell sorter) assays were performed on peripheral blood lymphocytes using a CD40-specific fluorescein conjugated antibody to detect B cells among the cell population. The percentage of positive cells was then used to calculate the number of B cells in the original samples. The data are graphed as thousands of B cells per microliter of blood measured at the days indicated after injection (FIG. 16).

### Example 7

### Construction and Expression of an Anti-CD19 ScFv-Ig Fusion Protein

[0262] An anti-CD19 scFv-Ig fusion protein was constructed, transfected into eukaryotic cells, and expressed according to methods presented in Examples 1, 2, and 5 and standard in the art. The variable heavy chain regions and variable light chain regions were cloned from RNA isolated from hybridoma cells producing antibody HD37, which specifically binds to CD19. Expression levels of a HD37scFv-IgAHWTG1C and a HD37scFv-IgMHWTG1C were measured and compared to a standard curve generated using purified HD37 scFvIg. The results are presented in FIG. 17.

### Example 8

### Construction and Expression of an Anti-L6 scFv-Ig Fusion Protein

[0263] An scFv-Ig fusion protein was constructed using variable regions derived from an anti-carcinoma mAb, L6. The fusion protein was constructed, transfected into eukaryotic cells, and expressed according to methods presented in Examples 1, 2, and 5 and standard in the art. Expression levels of L6scFv-IgAHWTG1C and L6scFv-IgMHWTG1C were measured and compared to a standard curve generated using purified HD37 scFvIg. The results are presented in FIG. 18.

### Example 9

### Characterization of Various scFv-Ig Fusion Proteins

[0264] In addition to the scFv-Ig fusion protein already described, G28-1 (anti-CD37) scFv-Ig fusion proteins were prepared essentially as described in Examples 1 and 5. The variable regions of the heavy and light chains were cloned according to methods known in the art. ADCC activity of 2H7-MHWTG1C, 2H7-IgAHWTG1C, G28-1-MHWTG1C, G28-1 IgAHWTG1C, HD37-MHWTG1C, and HD37-IgAHWTG1C was determined according to methods described above (see Example 2). Results are presented in FIG. 19. ADCC activity of L6scFv-IgAHWTG1C and L6scFv-IgMHWTG1C was measured using the 2981 human lung carcinoma cell line. The results are presented in FIG. 20. The murine L6 monoclonal antibody is known not to exhibit ADCC activity.

[0265] The purified proteins were analyzed by SDS-PAGE under reducing and non-reducing conditions. Samples were prepared and gels run essentially as described in Examples 2 and 5. The results for the L6 and 2H7 scFv-Ig fusion proteins are presented in FIG. 21 and the results for the G28-1 and HD37 scFv-Ig fusion proteins are presented in FIG. 22.

### Example 10

### Construction and Expression of Anti-CD20 scFv-Llama Ig Fusion Proteins

[0266] This Example illustrates the cloning of llama IgG1, IgG2, and IgG3 constant region domains and the construction of immunoglobulin fusion proteins with each of the three constant regions and anti-CD20 scFv.

[0267] The constant regions of llama IgG1, IgG2, and IgG3 immunoglobulins were cloned and inserted into mammalian vector constructs containing an anti-CD20 single chain Fv, 2H7 scFv. Total RNA was isolated from peripheral blood mononuclear cells (PBMC) from llama blood (Triple J Farms, Bellingham, Wash.) by lysing the lymphocytes in TRIzol® (Invitrogen Life Technologies, Carlsbad, Calif.) according to the manufacturer's instructions. One microgram (1 μg) of total RNA was used as template to prepare cDNA by reverse transcription. The RNA and 200 ng random primers were combined and denatured at 72° C. for 10 minutes prior to addition of enzyme. Superscript II reverse transcriptase (Invitrogen Life Technologies) was added to the RNA plus primer mixture in a total volume of 25 μl in the presence of 5× second strand buffer and 0.1 M DTT provided with the enzyme. The reverse transcription reaction was allowed to proceed at 42° C. for one hour. The cDNA was amplified by PCR using sequence specific primers. The 5′ primers were designed according to published sequences for the V_{HH} and V_{H} domains of camelids. The 3′ primer, which was used to amplify all three isotypes, was designed using mammalian CH3 domain sequences as a guide. The following specific primers were used. The Bcl and XbaI sites are indicated by underlined italicized sequences.

5′ primer for llama IgG1 constant region
LLG1-5′bgl:
(SEQ ID NO: 227)
5′-gtt gtt gat caa gaa cca cat gga gga tgc acg
tg-3′
5′ primer for llama IgG2 constant region
LLG2-5′bgl:
(SEQ ID NO: 228)
5′-gtt gtt gat caa gaa ccc aag aca cca aaa cc-3′
5′ primer for llama IgG3 constant region
LLG3-5′bgl:
(SEQ ID NO: 229)
5′-gtt gtt gat caa gcg cac cac agc gaa gac ccc-3′
3′ primer for llama IgG1, IgG2, and IgG3 constant
regions
LLG123-3′X:
(SEQ ID NO: 238)
5′-gtt gtt tct aga tta cta ttt acc cga aga ctg ggt
gat gga-3′

[0268] PCR fragments of the expected size were cloned into TOPO® cloning vectors (Invitrogen Life Technologies) and then were sequenced. The sense sequencing primer, LLseqsense, had the sequence 5′-ctg aga tcg agt tca gct g-3′ (SEQ ID NO: 230), and the antisense primer, LLseqAS, had the sequence 5′-cct cct ttg gct ttg tct c-3′ (SEQ ID NO: 231). Sequencing was performed as described in Example 1. FIG. 23 compares the amino acid sequence of the three isotype llama constant regions containing the hinge, CH2, and CH3 domains with the amino acid sequence of human IgG1 hinge, CH2, and CH3 domains.

[0269] After verifying the sequence, the amplified PCR products were digested with restriction enzymes BclI and XbaI to create compatible restriction sites. The digested fragments were then gel-purified, and the DNA was eluted using a QIAquick Gel Extraction Kit (QIAGEN, Valencia, Calif.). The 2H7scFv-Ig pD18 mammalian expression vector construct (see Example 2) was digested with BclI and XbaI to remove the human IgG hinge, CH2, and CH3 domains. The pD18 vector is a modified derivative of pCDNA3 that contains an attenuated DHFR gene, which serves as a selectable marker for mammalian expression (Hayden et al., Tissue Antigens 48:242-54 (1996)). The purified llama IgG1, IgG2, and IgG3 constant region PCR products were ligated by T4 DNA ligase (Roche Molecular Biochemicals, Indianapolis, Ind.) into the double-digested 2H7 scFv-pD18 vector at room temperature overnight according to the manufacturer's instructions. After ligation, the ligation products were transformed into E. coli DH5α bacteria (BD Biosciences, Palo Alto, Calif.) and plated according to standard molecular biology procedures and manufacturer's instructions. Isolated colonies were chosen to screen for transformants containing the correct inserts.

[0270] For expression of the encoded polypeptides, plasmid DNA from positive clones was transiently transfected into COS-7 cells using DEAE-dextran (Hayden et al., Ther Immunol. 1:3-15 (1994)). COS-7 cells were seeded at approximately 3×10⁶ cells per 150 mm plate and grown overnight until the cells were about 75% confluent. Cells were then washed once with serum-free DMEM (Invitrogen Life Technologies, Grand Island, N.Y.). Transfection supernatant (10 ml) containing 400 μg/ml DEAE-dextran, 0.1 mM chloroquine, and 5 μg/ml of the DNA constructs were added to the cells, which were then incubated at 37° C. for 3-4 hrs. After incubation, cells were pulsed with 10 ml of 10% dimethyl sulfoxide (DMSO) in 1×PBS at room temperature for 2 minutes. Cells were then placed back into fully supplemented DMEM/10% FBS (1% L-glutamine, 1% penicillin/streptomycin, 1% sodium pyruvate, 1% MEM essential amino acids) (Invitrogen Life Technologies). After 24 hours, the media was replaced with serum-free fully supplemented DMEM (Invitrogen Life Technologies), and the cells were maintained up to 21 days with media changes every 3-4 days.

[0271] Ig-fusion proteins were purified by passing COS cell culture supernatants through Protein A Agarose (Repligen, Cambridge, Mass.) columns. After application of the culture supernatant, the Protein A columns were then washed with 1×PBS (Invitrogen Life Technologies). Bound Ig-fusion proteins were eluted with 0.1 M citric acid (pH 2.8), and the collected fractions were immediately neutralized with Tris base (pH 10.85). The fractions containing protein were identified by measuring the optical density (A₂₈₀) and then were pooled, dialyzed against 1×PBS, (Invitrogen Life Technologies) and filtered through a 0.2 μm filter.

[0272] The purified Ig-fusion proteins were analyzed by SDS-PAGE. Aliquots of 2H7 scFv-llama IgG1, 2H7 scFv-llama IgG2, 2H7 scFv-llama IgG3, and Rituxan® (Rituximab, anti-CD20 antibody, Genentech, Inc. and IDEC Pharmaceuticals Corp.) (provided by Dr. Oliver W. Press, Fred Hutchison Cancer Research Center, Seattle, Wash.) (5 μg protein) were combined with 25 μl 2× NuPAGE® SDS Sample Buffer (Invitrogen Life Technologies) (non-reduced samples). Samples of each protein were also prepared in reducing sample buffer containing 5% 2-mercaptoethanol (Sigma-Aldrich, St. Louis, Mo.). Molecular weight markers (Invitrogen Life Technologies) were applied to the gels in non-reducing buffer only. The proteins were fractionated on NuPAGE® 10% Bis-Tris gels (Invitrogen Life Technologies). After electrophoresis (approximately 1 hour), the gels were washed three times, five minutes each, with Distilled Water (Invitrogen Life Technologies) and then stained in 50 ml Bio-Safe Coommassie Stain (BioRad, Hercules, Calif.) overnight at room temperature. After a wash in Distilled Water, the gels were photographed. The migration pattern of each Ig-fusion protein is presented in FIG. 24.

[0273] The ability of the 2H7 scFv-llama Ig fusion proteins to bind to cells expressing CD20 was demonstrated by flow cytometry. Serial dilutions starting at 25 μg/ml of purified 2H7 scFv-llama IgG1, 2H7 scFv-llama IgG2, and 2H7 scFv-llama IgG3 were prepared and incubated with CD20-transfected (CD20+) CHO cells (from the laboratory of Dr. S. Skov, Institute of Medical Microbiology and Immunology, Copenhagen Denmark in 1% FBS 1×PBS media (Invitrogen Life Technologies) for one hour on ice. After the incubation, the cells were then centrifuged and washed with 1% FBS in 1×PBS. To detect bound 2H7 scFv-llama Ig, the cells were incubated for one hour on ice with fluorescein-conjugated goat anti-camelid IgG (heavy and light chain) (1:100) (Triple J Farms). The cells were then centrifuged and resuspended in 1% FBS-1×PBS and analyzed using a Coulter Epics XL cell sorter (Beckman Coulter, Miami, Fla.). The data (percent of maximum brightness) are presented in FIG. 25.

### Example 11

### Effector Function of Anti-CD20 scFv-Llama Ig Fusion Proteins

[0274] This Example demonstrates the ability of anti-CD20 llama IgG1, IgG2, and IgG3 fusion proteins to mediate complement dependent cytotoxicity (CDC) and antibody dependent cell-mediated cytotoxicity (ADCC).

[0275] The ability of the 2H7 scFv-llama IgG fusion proteins to kill CD20 positive cells in the presence of complement was tested using the BJAB human B cell line. Rabbit complement was obtained from 3-4 week old rabbits (Pel-Freez, Brown Deer, Wis.). BJAB cells (2×10⁶ cells/ml) were combined with rabbit complement (final dilution 1:10) and purified 2H7 Ig fusion proteins. 2H7 scFv-llama IgG1, 2H7 scFv-llama IgG2, 2H7 scFv-llama IgG3, and 2H7 scFv-human IgG1 wild type hinge-CH2-CH3) (Example 1) were added at 1:3 serial dilutions beginning at a concentration of 30 μg/ml. After one hour at 37° C., cell viability was determined by counting live and dead cells by trypan blue exclusion (0.4%) (Invitrogen Life Technologies) using a hemacytometer (Bright-line, Horsham, Pa.). The percent killing was calculated by dividing the number of dead cells by the number of total cells (dead+live cells). The data presented in FIG. 26 show that all Ig fusion proteins had CDC activity.

[0276] The ADCC activity of the 2H7 scFv-llama IgG fusion proteins was determined using BJAB cells as target cells and human or llama peripheral blood mononuclear cells (PBMC) as effector cells. BJAB cells were pre-incubated for approximately 2 hours with ⁵¹Cr (100 μCi) (Amersham Biosciences, Piscataway, N.J.) in fully supplemented IMDM (Invitrogen Life Technologies) containing 15% FBS. The cells were mixed intermittently during the pre-incubation period. Fresh, resting human PBMC were purified from whole blood using Lymphocyte Separation Media (LSM) (ICN Pharmaceuticals, New York, N.Y.). PBMC were combined with labeled BJAB cells (5×10⁴ cells per well of 96 well tissue culture plate) at ratios of 25:1, 50:1, and 100:1. To each combination was added 10 μg/ml of purified 2H7 scFv-llama IgG1, 2H7 scFv-llama IgG2, 2H7 scFv-llama IgG3, Rituximab, or no anti-CD20 antibody. The mixtures were incubated for 6 hours at 37° C. Supernatant from each reaction containing ⁵¹Cr released from lysed cells was collected onto a LumaPlate-96 filter plate (Packard, Meriden, Conn.), which was dried overnight. The amount of ⁵¹Cr was measured by a TopCount NXT plate reader (Packard). FIG. 27 shows that the 2H7 scFv-llama IgG2 fusion protein was the most effective llama fusion protein in mediating ADCC. Each data point represents the average measurement of triplicate wells.

[0277] ADCC activity was affected by the source of effector cells. Llama PBMC were isolated from llama blood (Triple J Farms) using LSM. Llama effector cells were added at the same ratios to BJAB target cells as described for the ADCC assay using human effector cells. The cells were combined with 10 μg/ml of purified 2H7 scFv-llama IgG1, 2H7 scFv-llama IgG2, 2H7 scFv-llama IgG3, Rituximab, or no anti-CD20 antibody. The results are presented in FIG. 28.

### Example 12

### Construction and Characterization of scFv Ig Fusion Proteins Expressed on the Cell Surface

[0278] This Example describes a retroviral transfection system for ectopic surface expression of genetically engineered cell surface receptors composed of scFvs that bind costimulatory receptors. The Example also demonstrates the effector function of these various scFv Ig fusion proteins expressed on the surface of target cells.

[0279] The heavy and light chain variable regions were cloned from murine monoclonal antibodies specific for various costimulatory receptors, and single chain Fv constructs were prepared essentially as described in Example 1. Antibodies included 2H7, anti-human CD20; 40.2.220, anti-human CD40; 2E12, anti-human CD28; 10A8, anti-human CD152 (anti-CTLA-4); and 500A2, anti-murine CD3. The heavy chain and light chain variable regions of each antibody were cloned according to standard methods for cloning immunoglobulin genes and as described in Example 1. Single chain Fv constructs were prepared as described in Example 1 by inserting a nucleotide sequence encoding a (gly₄ser)₃ peptide linker between the VL region nucleotide sequence of 40.2.220, 2E12, 10A8, and 500A2, respectively (SEQ ID NOs: 243 or 462; 249 or 468; 474; 263, respectively) and the VH region nucleotide sequence of 40.2.220, 2E12, 10A8, and 500A2, respectively (SEQ ID NOs: 245 or 464; 251 or 470; 261 or 476; 257, respectively). The polypeptide sequence for VL of 40.2.220, 2E12, 10A8, and 500A2 are set forth in SEQ ID NOs: 244 or 463; 250 or 469; 255 or 475; 264, respectively, and the polypeptide sequence for VH of 40.2.220, 2E12, 10A8, and 500A2 are set forth in SEQ ID NOs: 246 or 465; 252 or 471; 258 or 477; 262, respectively. Each scFv polynucleotide (SEQ ID NOs: 247 or 466; 253 or 472; 259 or 478; 399 for 40.2.220, 2E12, 10A8, and 500A2, respectively) was then fused to human IgG1 mutant hinge (CCCSSS) and mutant CH2 (proline to serine mutation at residue 238 (238 numbering according to EU nomenclature, Ward et al., 1995 Therap. Immunol. 2:77-94; residue 251 according to Kabat et al.) and wild type CH3 domains according to the methods described in Example 5 and 11. Each scFv mutant IgG1 fusion polynucleotide sequence was then fused in frame to sequences encoding the transmembrane domain and cytoplasmic tail of human CD80 (SEQ ID NO: 460), such that when the fusion protein was expressed in the transfected cell, CD80 provided an anchor for surface expression of the scFv Ig fusion protein. cDNAs encoding the scFv-IgG-CD80 fusion proteins (SEQ ID NOs: 268 or 483; 265 or 481; 270 or 485; 272 or 487 for 40.2.220-, 2E12-, 10A8-, and 500A2-scFv-IgG-CD80, respectively) were inserted into the retroviral vector pLNCX (BD Biosciences Clontech, Palo Alto, Calif.) according to standard molecular biology procedures and vendor instructions. The scFv-Ig-CD80 cDNA was inserted between the 5′LTR-neomycin resistance gene-CMV promoter sequences and the 3′LTR sequence. The retroviral constructs were transfected into Reh, an acute lymphocytic leukemia cell line (ATCC CRL-8286). Transfected cells were screened to select clones that were expressing scFv-Ig fusion proteins on the cell surface.

[0280] CDC and ADCC assays were performed with the transfected Reh cells to determine if expression of the scFv-Ig polypeptides on the cell surface augmented effector cell function. Reh cells expressing anti-human CD152 scFv-mutant IgG-CD80 (SEQ ID NO: 270 or 485); Reh anti-human CD28 scFv-mutant IgG-CD80 (SEQ ID NOS: 268 or 483); Reh anti-human CD40 scFv-mutant IgG-CD80 (SEQ ID NOS: 265 or 481); Reh anti-human CD20 scFv-mutant IgG-CD80 were combined with human PBMC (see Example 11) and rabbit complement (10 μg/ml) for one hour at 37° C. Untransfected Reh cells were included as a control. Viability of the cells was determined by trypan blue exclusion, and the percent of killed cells was calculated (see Example 11). FIG. 29 shows the effectiveness of the scFv-IgG-CD80 fusion proteins when expressed on the cell surface of tumor cells to mediate complement dependent cytotoxicity.

[0281] The same transfected Reh cells tested in the CDC assay plus Reh cells transfected with the polynucleotide construct that encodes anti-murine CD3-scFv-Ig-CD80 (SEQ ID NO: 486) were analyzed for ADCC activity (see Example 11). Untransfected and transfected Reh cells were pre-labeled with ⁵¹Cr (100 μCi) (Amersham) for two hours at 37° C. Human PBMC served as effector cells and were added to the Reh target cells (5×10⁴ cells per well of 96 well plate) at ratios of 5:1, 2.5:1, and 1.25:1. After five hours at 37° C., culture supernatants were harvested and analyzed as described in Example 11. Percent specific killing was calculated according to the following equation: ((experiment release minus spontaneous release)/(maximum release minus spontaneous release))×100. The data are presented in FIG. 30. Each data point represents the average of quadruplicate samples.

[0282] Using the same procedures described above, the same results with other binding domains were obtained using the following monoclonal antibodies mAbs as sources of sFv: for CD20, 1F5 (Genbank AY 058907 and AY058906); for CD40, 2.36 and G28.5; for CD28, 9.3.

[0283] Cell surface expression of antibody binding domains is accomplished by fusing antibody scFvs to IgA hinge and constant regions and IgE hinge and constant regions. Polynucleotides encoding an anti-4-1BB scFv, 5B9 (anti-human 4-1BB) scFv, and 2e12 (anti-human CD40) fused to IgAH IgA T4 (four terminal CH3 residues deleted) fused to the CD80 transmembrane and cytoplasmic domains and IgE Fc regions are shown in SEQ ID NOs: 626 and 630. The encoded polypeptides are shown in SEQ ID NOs: 627 and 631.

### Example 13

### Construction and Sequence of Human Ig Hinge-CH2-CH3 Mutants and 2H7 Variable Region Mutants

[0284] This Example describes construction of scFv fusion proteins containing mutant human IgG1 and IgA constant regions. This Example also describes construction of a 2H7 scFv mutant with a single point mutation in the variable heavy chain region. Mutations were introduced into variable and constant region domains according to methods described herein and known in the molecular biology arts. FIG. 31 presents nomenclature for the Ig constant region constructs.

[0285] The human IgG1 hinge region of the 2H7 scFv human IgG1 hinge-CH2-CH3 fusion proteins was mutated to substitute cysteine residues that in a whole immunoglobulin are involved in forming disulfide bonds between two heavy chain molecules. One mutant, 2H7 scFv fused to a human IgG1 hinge region in which all three cysteine residues were mutated to serine residues (MTH (SSS)), was prepared as described in Example 5 (designated in Example 5 as CytoxB-MHWTG1C (includes wild type IgG1 CH2 and CH3 domains)) (now referred to as 2H7 scFv MTH (SSS) WTCH2CH3) and comprises the polynucleotide sequence SEQ ID NO: 4 encoding the polypeptide as set forth in SEQ ID NO: 17. The polynucleotide sequence encoding this mutant (SEQ ID NO: 4) was used as a template to create mutant hinge regions in which the first two cysteine residues were substituted with serine residues (IgG MTH (SSC)). An oligonucleotide was designed to substitute the third serine residue with a cysteine and had the following sequence: 5′-gtt gtt gat cag gag ccc aaa tct tct gac aaa act cac aca tct cca ccg tgc cca gca cct g-3′ (HuIgGMHncs3, SEQ ID NO: 275). A second mutant was prepared in which the mutant hinge had serine residues substituting the first and third cysteine residues (IgG MTH (SCS)). The sequence of the oligonucleotide to create this mutant was as follows: 5′-gtt gtt gat cag gag ccc aaa tct tct gac aaa act cac aca tgc cca ccg-3′ (HuIgGMHncs2, SEQ ID NO: 276). A third mutant was prepared with cysteine residues substituted at the second and third positions (IgG MTH (CSS)), also using the IgG MTH (SSS) mutant as template, and an oligonucleotide having the sequence, 5′-gtt gtt gat cag gag ccc aaa tct tgt gac aaa act cac-3′ (HuIgGMHncs1, SEQ ID NO: 277).

[0286] The oligonucleotides introducing the mutations into the hinge region were combined with template and a 3′ oligonucleotide containing an XbaI site (underlined and italicized) (5′-gtt gtt tct aga tca ttt acc cgg aga cag gga gag gct ctt ctg cgt gta g-3′ (SEQ ID NO: 278)) to amplify the mutant hinge-wild type (WT)-CH2-CH3 sequences by PCR. The IgG MTH CSS and IgG MTH SCS mutant sequences were amplified for 25 cycles with a denaturation profile of 94° C., annealing at 52° C. for 30 seconds, and extension at 72° C. for 30 seconds. The IgG MTH SSC mutant sequence was amplified under slightly different conditions: denaturation profile of 94° C., annealing at 45° C. for 30 seconds, and extension at 72° C. for 45 seconds. The amplified polynucleotides were inserted into the TOPO® cloning vector (Invitrogen Life Technologies) and then were sequenced as described in Example 1 to confirm the presence of the mutation. pD18 vector containing 2H7 scFv was digested to remove the constant region sequences essentially as described in Example 10. The mutant hinge-wild type CH2-CH3 regions were inserted in frame into the digested vector DNA to obtain vectors comprising 2H7 scFv MTH (CSS) WTCH2CH3 encoding DNA (SEQ ID NO: 581); 2H7 scFv MTH (SCS) WTCH2CH3 encoding DNA (SEQ ID NO: 583); and 2H7 scFv MTH (SSC) WTCH2CH3 encoding DNA (SEQ ID NO: 585).

[0287] A mutation of leucine to serine at position 11 in the first framework region of the heavy chain variable region (numbering according to Kabat et al., Sequences of Proteins of Immunological Interest, 5^{th} ed. Bethesda, Md.: Public Health Service, National Institutes of Health (1991)) was introduced into the 2H7 scFv MTH (SSS) WTCH2CH3 fusion protein (SEQ ID NOS: 4 or 488). The wild type leucine residue was substituted with serine by site-directed mutagenesis using the oligonucleotide Vhser11: 5′-gga ggt ggg agc tct cag gct tat cta cag cag tct ggg gct gag tcg gtg agg cc-3′ (SEQ ID NO: 279). The 3′-primer for PCR was huIgG1-3′ having the sequence 5′-gtc tct aga cta tca ttt acc cgg aga cag-3′ (SEQ ID NO: 280) (XbaI site underlined and italicized). After PCR amplification, the fragments were inserted into the TOPO® cloning vector and sequenced to confirm the presence of the VH11 leucine to serine mutation. The 2H7 scFv-IgG MTH (SSS) WTCH2CH3 encoding DNA was shuttled into the PSL1180 cloning vector (Pharmacia Biotech, Inc., Piscataway, N.J.). The construct PSL1180-2H7 scFv-IgG MTH (SSS) WTCH2CH3 was digested with Sac and XbaI to remove the wild type VH domain and the hinge and CH2 and CH3 domains. The PCR product comprising the VH11 mutant was digested with Sac and XbaI and then inserted into the digested PSL1180 construct according to standard molecular biology procedures. The construct was then digested with Hind III and XbaI, and inserted into the mammalian expression vector pD18 (see methods described in Example 1 and Example 10). The mutant is designated 2H7 scFv VH11SER IgG MTH (SSS) WTCH2CH3 (FIG. 31). Four constructs containing IgA constant region domains were prepared. One construct contained wild type IgA hinge fused to human IgG1 CH2 and CH3 (IgAH IgG WTCH2CH3) (FIG. 31). Sequential PCR amplifications were performed to substitute the human IgG1 hinge of the 2H7 scFv construct with nucleotide sequences encoding the IgA hinge. The 5′ oligonucleotide primer (huIgA/Gchim5) for the first PCR reaction had the sequence, 5′-cca tct ccc tca act cca cct acc cca tct ccc tca tgc gca cct gaa ctc ctg-3′ (SEQ ID NO: 281). The primer (huIgAhg-5′) for the second PCR reaction to add more IgA specific hinge sequence and add a BclI restriction enzyme site (italicized and underlined) had the sequence, 5′-gtt gtt gat cag cca gtt ccc tca act cca cct acc cca tct ccc caa ct-3′ (SEQ ID NO: 282). The 3′ primer for both amplification steps was huIgG1-3′ having the sequence, 5′-gtc tct aga cta tca ttt acc cgg aga cag-3′ (SEQ ID NO: 280). The sequence of the PCR product was confirmed by TOPO® cloning as described above. The gel-purified fragment was digested with BclI and XbaI and then inserted into the 2H7 scFv-pD18 vector that had been digested BclI and XbaI to remove all the IgG1 constant region domains. Ligation was performed as described in Example 10 to provide a mammalian expression vector comprising the nucleotide sequence (SEQ ID NO: 283) encoding a 2H7 scFv IgA hinge-IgG1 CH2-CH3 polypeptide (SEQ ID NO: 284).

[0288] A second pD18 mammalian expression vector was constructed that had a polynucleotide sequence (SEQ ID NO: 1) that encoded a 2H7 scFv fused to wild type IgA hinge, CH2, and CH3 domains (SEQ ID NO: 285). Human IgA constant regions sequences were obtained by using random primers to reverse transcribe total RNA isolated from human tonsil followed by PCR amplification of the cDNA using sequence specific primers, essentially as described in Example 10. Human IgA hinge-CH2-CH3 nucleotide sequence (SEQ ID NO: 285) encoding the IgA-CH2-CH3 polypeptide (IgAH IgACH2CH3, FIG. 31) (SEQ ID NO: 286) was amplified using the 5′ oligonucleotide huIgAhg-5′ (SEQ ID NO:(same as above, SEQ ID NO: 281) and a 3′ oligonucleotide huIgA3′ having the sequence, 5′-gtt gtt tct aga tta tca gta gca ggt gcc gtc cac ctc cgc cat gac aac-3′ (SEQ ID NO: 289). Secretion of a 2H7-IgA hinge-IgA CH2-CH3 polypeptide from transfected mammalian cells required co-expression of human J chain that covalently binds to two IgA CH3 domains via disulfide bonds. Total RNA was isolated from tonsil B cells and was reversed transcribed to generate cDNA as described above. PCR amplification of the nucleotide sequence encoding the J chain was performed with J chain specific primers. The 5′ PCR primer, HUJCH5n1, had the sequence, 5′-gtt gtt aga tct caa gaa gat gaa agg att gtt ctt-3′ (SEQ ID NO: 292), and sequence of the 3′ primer, HUJCH3, was 5′-gtt gtt tct aga tta gtc agg ata gca ggc atc tgg-3′ (SEQ ID NO: 293). The cDNA was cloned into TOPO® for sequencing as described in Example 10. J chain encoding cDNA (SEQ ID NO: 290) was then inserted into pD18 and pCDNA3-Hygro (+) (Invitrogen Life Technology) vectors for co-transfection with 2H7 scFv IgA hinge-CH2-CH3 constructs. The J chain has the predicted amino acid sequence set forth in SEQ ID NO: 291.

[0289] Secretion of an scFv IgA constant region construct in the absence of J chain was accomplished by engineering a truncated CH3 domain with a deletion of the four carboxy terminal amino acids (GTCY, SEQ ID NO: 294) (IgAH IgA-T4, FIG. 31), which include a cysteine residue that forms a disulfide bond with the J chain. The IgA hinge-CH2-CH3 nucleotide sequence containing the deletion in CH3 (SEQ ID NO: 295) was prepared using a 5′ PCR primer (huIgAhg-5′) having the sequence 5′-gtt gtt gat cag cca gtt ccc tca act cca cct acc cca tct ccc tca act-3′ (SEQ ID NO: 310) (BclI site is underlined and italicized), and a 3′ PCR primer (HUIGA3T1) having the sequence 5′-gtt gtt tct aga tta tca gtc cac ctc cgc cat gac aac aga cac-3′ (SEQ ID NO: 297). This mutated IgA constant region nucleotide sequence was inserted into a 2H7 scFv pD18 vector as described for the generation of the previous 2H7 scFv-Ig constructs (see Example 1 and this example) that comprises the polynucleotide sequence (SEQ ID NO: 298) encoding a 2H7 IgAH IgA-T4 polypeptide (SEQ ID NO: 299).

[0290] A fourth construct was prepared that encoded a 2H7 scFv-IgA constant region fusion protein with a deletion of 14 additional amino acids, most of which are hydrophobic residues, from the carboxy terminus of IgA CH3. The 2H7 scFv-IgAH IgA-T4 encoding polynucleotide was used as template to engineer a deletion of the nucleotide sequence encoding PTHVNVSVVMAEVD (SEQ ID NO: 300). The 5′ oligonucleotide primer had the sequence 5′-gtt gtt gat cag cca gtt ccc tca act cca cct acc cca tct ccc tca act-3′ (SEQ ID NO: 310) (BclI site shown as underlined and italicized). The 3′ oligonucleotide sequence was 5′-gtt gtt tct aga tta tca ttt acc cgc caa gcg gtc gat ggt ctt-3′ (SEQ ID NO: 301). The deleted IgA CH3 region was amplified by using the above oligonucleotides to amplify the IgA constant region from RNA isolated from human tonsil such that the cDNA contained the deleted carboxyl terminal encoding region for the 18 amino acids. The IgAH IgA-T18 constant region was inserted into a 2H7 scFv pD18 vector that comprises the polynucleotide sequence (SEQ ID NO: 302) encoding a 2H7 IgAH IgA-T18 polynucleotide (SEQ ID NO: 303) as described above.

### Example 14

### Effector Function of CTLA-4 IgG Fusion Proteins

[0291] The Example compares the effector functions of CTLA-4 Ig fusion proteins in CDC and ADCC assays.

[0292] Two CTLA-4 IgG fusion proteins were constructed. One fusion protein comprises the extracellular domain of CTLA-4 fused to human IgG1 wild type hinge, CH2, and CH3 domains and is designated CTLA-4 IgG WTH (CCC) WTCH2CH3 (SEQ ID NO: 307). A pD18 mammalian expression vector comprising a polynucleotide sequence encoding CTLA-4 IgG WTH (CCC) WTCH2CH3 (SEQ ID NO: 306) was prepared by fusing in frame the nucleotide sequence encoding the extracellular domain of CTLA-4 (SEQ ID NO: 308) (see U.S. Pat. No. 5,844,095) to the nucleotide sequence encoding IgG WTH (CCC) WTCH2CH3 according to the methods described in Examples 1 and 10. The extracellular domain nucleotide sequence also comprises a BclI restriction enzyme site at the 3′ end, and a leader peptide nucleotide sequence (SEQ ID NO: 313) that encodes an oncoM leader peptide (SEQ ID NO: 314). A second CTLA-4 IgG fusion protein, designated CTLA-4 IgG MTH (SSS) MTCH2WTCH3, contained the extracellular domain of CTLA-4 (plus the oncoM leader peptide sequence) fused to a mutant IgG hinge in which all three cysteine residues were replaced with serine residues. The hinge region was fused to a mutant IgG1 CH2 domain that had a mutation at isotype position 238 (EU numbering, Ward et al., supra, (position 251 using numbering according to Kabat et al., supra; position 209 where numbering commences with first residue of IgG1 CH1; i.e., PAPELLGGPS (SEQ ID NO: 537) of wild type IgG1 CH2 is modified to PAPELLGGSS (SEQ ID NO: 583), which was fused to IgG1 wild type CH3 (U.S. Pat. No. 5,844,095). The CTLA-4 IgG MTH (SSS) MTCH2WTCH3 polynucleotide comprises the nucleotide sequence in SEQ ID NO: 315 and the deduced amino acid sequence comprises the sequence provided in SEQ ID NO: 316. CTLA-4 fusion proteins were also prepared using CTLA-4 extracellular membrane encoding sequences without the leader peptide (SEQ ID NO: 313 (DNA) and 314 (AA)).

[0293] To measure CDC activity, purified CTLA-4 IgG WTH (CCC) WTCH2CH3 (2 μg/ml) or CTLA-4 IgG MTH (SSS) MTCH2WTCH3 (2 μg/ml) was added to Reh cells (see Example 12) and to Reh cells transfected with the costimulatory molecule CD80 such that CD80 was expressed on the cell surface (Reh CD80.10, obtained from Dr. E. Clark, University of Washington, Seattle, Wash.; see Doty et al., 1998 J. Immunol. 161:2700; Doty et al., 1996 J. Immunol. 157:3270), in the presence or absence of rabbit complement (10 μg/ml). Purified CTLA Ig fusion proteins were prepared from culture supernatants of transiently transfected COS cells according to methods described in Example 10. The assays were performed essentially as described in Example 11 and 12. The data presented in FIG. 32 show that only CD80-transfected Reh cells were killed in the presence of complement and CTLA-4 IgG WTH (CCC) WTCH2CH3 fusion protein.

[0294] The purified CTLA-4 Ig fusion proteins were also tested in ADCC assays. Human PBMC, serving as effector cells, were added to Reh or Reh CD80.1 target cells at a ratio of 1.25:1, 2.5:1, 5.0:1, and 10:1. Cells were labeled and the assays performed essentially as described in Examples 11 and 12. The results are presented in FIG. 33. Each data point represents the average of four independent culture wells at each effector:target cell ratio. The data show that only CTLA-4 IgG WTH (CCC) WTCH2CH3 mediated significant ADCC of Reh CD80.10 cells.

### Example 15

### Effector Function of CTLA-4 IgA Fusion Proteins

[0295] CTLA-4 IgA fusion proteins are prepared as described for the IgG fusion proteins (see Examples 1, 13, and 14). CTLA-4 extracellular domain nucleotide sequence (SEQ ID NO: 313) is fused in open reading frame to nucleotides encoding IgAH IgACH2CH3 (SEQ ID NO: 287) to provide the nucleotide sequence (SEQ ID NO: 319) encoding a CTLA-4 IgAH IgACH2CH3 fusion protein (SEQ ID NO: 320). The fusion protein is transiently expressed in COS cells (see Example 10) or stably expressed in CHO cells (see Example 1). Secretion of the CTLA-4 IgAH IgACH2CH3 fusion protein requires co-transfection with a construct containing a polynucleotide sequence (SEQ ID NO: 290) that encodes human J chain (SEQ ID NO: 291). The CTLA-4 IgAH IgACH2CH3 fusion protein is isolated as described in Examples 10 and 14. To express a CTLA-4 IgA construct without the presence of J chain, a CTLA-4 IgAH IgA-T4 construct is prepared and transfected into mammalian cells. In a similar manner as described for the CTLA-4 extracellular fragment fused to wild type IgA hinge-CH2CH3, the CTLA-4 extracellular domain nucleotide sequence (SEQ ID NO: 308) is fused in open reading frame to a nucleotide sequence (SEQ ID NO: 295) encoding a IgAH IgA-T4 polypeptide (SEQ ID NO: 296) to provide a nucleotide sequence comprising SEQ ID NO: 319 encoding a CTLA-4 IgAH IgA-T4 polypeptide (SEQ ID NO: 320). Effector function of each construct is evaluated by CDC and ADCC as described in Example 14.

### Example 16

### Binding of Anti-CD20 scFv Human Ig Fusion Proteins to CHO Cells Expressing CD20

[0296] This Example describes binding of 2H7 scFv Ig fusion proteins to CHO cells that express CD20. The analysis was performed by flow cytometry. Culture supernatants were collected from transiently transfected COS cells expressing 2H7 scFv IgG WTH (CCC) WTCH2CH3 (SEQ ID NOS: 2, 15; 239, 240; 458, 459); 2H7 scFv IgG MTH (CSS) WTCH2CH3 (SEQ ID NO: 582); 2H7 scFv IgG MTH (SCS) WTCH2CH3 (SEQ ID NO: 584); and 2H7 scFv VHSER11 WTH WTCH2CH3, and two-fold serial dilutions were prepared. Serial two-fold dilutions of purified 2H7 scFv IgG MTH (SSC) WTCH2CH3 (SEQ ID NOS: 585, 586) were prepared starting at a concentration of 5 μg/ml. The culture supernatants and purified fusion protein samples were incubated with (CD20+) CHO cells for one hour on ice. The cells were washed twice and then incubated with 1:100 FITC-conjugated goat anti-human IgG (CalTag) for 40 minutes. The unbound conjugate was then removed by washing the cells and flow cytometry analysis was performed using a Coulter Epics XL cell sorter. Results are presented in FIG. 34.

### Example 17

### Immunoblot Analysis of Anti-CD20 scFv Human IgG and IgA Fusion Proteins

[0297] This Example describes immunoblot analysis of 2H7 scFv IgG and 2H7 scFv IgA fusion proteins that were immunoprecipitated from transfected cell culture supernants.

[0298] COS cells were transiently transfected with plasmids comprising nucleotide sequences for 2H7 scFv IgG WTH (CCC) WTCH2CH3 (SEQ ID NO: 458); 2H7 scFv IgG MTH (CSS) WTCH2CH3 (SEQ ID NO: 581); 2H7 scFv IgG MTH (SCS) WTCH2CH3 (SEQ ID NO: 583); 2H7 scFv IgA H IgG WTCH2CH3 (SEQ ID NOS: 283, 499); and scFv IgG MTH (SSS) WTCH2CH3 (SEQ ID NOS: 273, 488) essentially according to the method described in Example 10. Cells were also transfected with vector only. After 48-72 hours at 37° C., cell culture supernatants were harvested and combined with protein A-agarose beads (Repligen) for one hour at 4° C. The beads were centrifuged and washed several times in TNEN [20 mM Tris base, 100 mM NaCl, 1 mM EDTA, and 0.05% NP-40, pH 8.0). The immunoprecipitates were combined with 25 μl 2× NuPAGE® SDS Sample Buffer (Invitrogen Life Technologies) (non-reduced samples). The proteins were fractionated on NuPAGE® 10% Bis-Tris gels (Invitrogen Life Technologies). After electrophoresis (approximately 1 hour), the proteins were transferred from the gel onto a Immobilon P polyvinylidene fluoride (PVDF) membrane (Millipore, Bedford, Mass.) using a semi-dry blotter (Ellard Instrumentation, Monroe, Wash.). The PVDF membrane was blocked in PBS containing 5% nonfat milk and then probed with HRP-conjugated goat anti-human IgG (Fc specific) (CalTag). After washing the immunoblot several times in PBS, the blot was developed using ECL (Amersham Biosciences). The results are shown in FIG. 35.

### Example 18

### Binding of Anti-CD20 scFv Human IgA Fusion Proteins to CD20+ CHO Cells

[0299] This Example describes flow immunocytofluorimetry analysis of binding of 2H7 scFv IgAH IgACH2CH3 (SEQ ID NOS: 286, 502) and 2H7 scFv IgAH IgAT4 (SEQ ID NOS: 299, 515) fusion proteins to (CD20+) CHO cells.

[0300] COS cells were transiently co-transfected as described in Example 10 with plasmid DNA comprising a polynucleotide sequence (SEQ ID NO: 285) encoding 2H7 scFv IgAH IgACH2CH3 polypeptide (SEQ ID NO: 501) and with a separate plasmid comprising a polynucleotide sequence (SEQ ID NO: 290) encoding a human J chain polypeptide (SEQ ID NO: 291). COS cells were also transfected with a polynucleotide sequence (SEQ ID NOS: 298, 514) encoding a 2H7 scFv IgA fusion protein that had a deletion of four amino acids at the carboxy terminus of CH3 (2H7 scFv IgAH IgA-T4, SEQ ID NOS: 299, 515). The transfections were performed as described in Example 10. Culture supernatants from transfected COS cells were combined with (CD20+) CHO cells (see Example 1) and incubated for one hour on ice. The cells were washed twice with PBS-2% FBS and then combined with FITC-conjugated goat anti-human IgA chain (CalTag) (1:100) for 40 minutes. The cells were again washed and then analyzed by flow cytometry using a Coulter Epics XL cell sorter. FIG. 36 shows that co-transfection with J chain was not required for secretion of 2H7 scFv IgAH IgAT4, the 2H7 IgA fusion protein with the truncated CH3 carboxy end (SEQ ID NO: 299, 515).

### Example 19

### Effector Function of Anti-CD20 scFv Human IgA Fusion Proteins

[0301] This Example illustrates ADCC activity of 2H7 IgG and IgA fusion proteins against cells that express CD20. BJAB cells were prelabeled with ⁵¹Cr (100 μCi) (Amersham) for two hours at 37° C. Effector cells were obtained from fresh, resting human whole blood, which was diluted in an equal volume of Alsever's solution to prevent coagulation. 2H7 scFv IgG MTH (SSS) WTCH2CH3 (SEQ ID NO: 489); 2H7 scFv IgG MTH (SCS) WTCH2CH3 (SEQ ID NO: 586); 2H7 scFv IgG WTH (CCC) WTCH2CH3 (SEQ ID NO: 459); and 2H7 scFv IgAH IgACH2CH3 (SEQ ID NO: 299, 515) fusion proteins were purified from transiently transfected COS cell supernatants (100-200 ml) by protein A chromatography as described in Example 10. COS cells transfected with the plasmid encoding 2H7 scFv IgAH IgACH2CH3 were co-transfected with a plasmid encoding human J chain as described in Example 18. Two-fold serial dilutions of the purified 2H7 Ig fusion proteins starting at 5 μg/ml were added to the labeled BJAB cells (5×10⁴ cells per well of 96 well tissue culture plate) in the presence of whole blood (100 μl of whole blood diluted 1:1 in Alsever's solution, final dilution 1:4) and incubated for five hours at 37° C. Culture supernatants were harvested and analyzed as described in Example 11. Percent specific killing was calculated according to the following equation: ((experiment release minus spontaneous release)/(maximum release minus spontaneous release))×100. The data are presented in FIG. 37. Each data point represents the average of quadruplicate samples.

[0302] In a second ADCC assay, the number of labeled BJAB target cells was held constant in each sample, and whole blood was added at dilutions of 0.25, 0.125, and 0.0625. Purified 2H7 IgG and IgA fusion proteins were added at a concentration of 5 μg/ml. The BJAB cells, whole blood, and fusion proteins were incubated, the supernatants harvested, and the percent specific killing was calculated as described above. Percent specific killing for each of the 2H7 fusion proteins is presented in FIG. 38.

[0303] The ADCC activity of purified 2H7 scFv IgG MTH (SSS) WTCH2CH3 (5 μg/ml) and of purified 2H7 scFv IgAH IgACH2CH3 (5 μg/ml) was compared in the presence of different effector cell populations. PBMC were isolated from whole blood as described in Examples 11 and 12. PBMC were combined with labeled BJAB target cells (5×10⁴ per well of 96 well tissue culture plate) at ratios of 50:1, 25:1, and 12.5:1. The assay was performed and the data analyzed as described above. FIG. 39A shows that only the 2H7 scFv IgG MTH (SSS) WTCH2CH3 fusion protein had ADCC activity when PBMC served as the effector cells. FIG. 39B shows that both 2H7 scFv IgG MTH (SSS) WTCH2CH3 and 2H7 scFv IgAH IgACH2CH3 exhibit ADCC activity when whole blood was the source of effector cells (as illustrated in FIG. 38).

### Example 20

### Expression Level of 2H7 scFv VH11Ser IgG MTH (SSS) WTCH2CH3 Fusion Protein

[0304] This Example compares the expression level of 2H7 scFv VH11Ser IgG MTH (SSS) WTCH2CH3 fusion protein (SEQ ID NO: 488) with other 2H7 scFv IgG constructs that do not contain the mutation in the variable heavy chain domain. The mammalian expression vector pD18 comprising nucleotide sequences 2H7 scFv IgG MTH (SSS) WTCH2CH3 (SEQ ID NO: 488); 2H7 scFv IgG MTH (CSS) WTCH2CH3 (SEQ ID NO: 581); 2H7 scFv IgG MTH (SCS) WTCH2CH3 (SEQ ID NO: 583); 2H7 scFv IgG WTH (CCC) WTCH2CH3 (SEQ ID NO: 458); and 2H7 scFv VHSER11 IgG MTH (SSS) WTCH2CH3 (see Examples 1 and 13) were transiently transfected into COS cells as described in Example 10. After 72 hours at 37° C., culture supernatants were harvested, and 1 μl of each supernatant was combined with non-reducing sample buffer (see method described in Example 10). The culture supernatant samples and aliquots of purified 2H7 scFv IgG MTH (SSS) WTCH2CH3 (40 ng, 20 ng, 10 ng/5 ng, and 2.5 ng) were fractionated on 10% Bis-Tris (MOPS) NuPAGE® gels (Invitrogen Life Technologies). Multimark® protein standards (Invitrogen Life Technologies) were also separated on the gel. The proteins were transferred to a PDVF membrane and immunoblotted as described in Example 17. The immunoblot is presented in FIG. 40. The amounts of the fusion proteins were quantified by densitometry analysis of the blots using the ScionImage for Windows software and comparison with the standard curve. The 2H7 scFv IgG WTH (CCC) WTCH2CH3 construct produced approximately 12 ng/ul or 12 micrograms/ml, the 2H7 scFv IgG MTH (CSS) WTCH2CH3 produced approximately 10 ng/ul or 10 micrograms/ml, the 2H7 scFv IgG MTH (SCS) WTCH2CH3 construct produced approximately 1 ng/ul or 1 microgram/ml, and the 2H7 scFv VHSER11 IgG MTH (SSS) WTCH2CH3 construct produced approximately 30 ng/ml or 30 micrograms/ml.

### Example 21

### Construction of a 2H7 scFv IgG Fusion Protein with a Mutant CH3 Domain

[0305] Amino acid mutations were introduced into the CH3 domain of a 2H7 IgG fusion protein. The pD18 vector comprising 2H7 scFv IgG MTH (SSS) WTCH2CH3 (SEQ ID NO: 488) was digested with BclI and XbaI to remove the MTH WTCH2CH3 (SEQ ID NO: 6) fragment, which was then subcloned into pShuttle vector (BD Biosciences Clontech, Palo Alto, Calif.) that was double-digested with BclI and XbaI. Subcloning was performed in a kanamycin resistant vector because the ampicillin resistance gene has an XmnI site, which is required for this cloning procedure. Five constructs were prepared with the following substitutions: (1) a phenylalanine residue at position 405 (numbering according to Kabat et al. supra) was substituted with tyrosine using the oligonucleotide CH3Y405; (2) the phenylalanine position at 405 was substituted with an alanine residue using the oligonucleotide CH3A405; (3) the tyrosine residue at position 407 was substituted with an alanine using the oligonucleotide CH3A407; (4) both wild type amino acids at positions 405 and 407 were substituted with tyrosine and alanine, respectively using the oligonucleotide CH3Y405A407; and (5) both wild type amino acids at positions 405 and 407 were substituted with alanine using the oligonucleotide CH3A405A407. The oligonucleotides were the 3′ primers for PCR amplification of a portion of the CH3 domain. The nucleotide sequences for each 3′ oligonucleotide were as follows.

CH3Y405:
(SEQ ID NO: 365)
5′-gtt gtt gaa gac gtt ccc ctg ctg cca cct gct ctt
gtc cac ggt gag ctt gct gta gag gta gaa gga gcc-3′
CH3A405:
(SEQ ID NO: 366)
5′-gtt gtt gaa gac gtt ccc ctg ctg cca cct gct ctt
gtc cac ggt gag ctt gct gta gag ggc gaa gga gcc-3′
CH3A407:
(SEQ ID NO: 367)
5′-gtt gtt gaa gac gtt ccc ctg ctg cca cct gct ctt
gtc cac ggt gag ctt gct ggc gag gaa gaa gga gcc-3′
CH3Y405A407:
(SEQ ID NO: 368)
5′-gtt gtt gaa gac gtt ccc ctg ctg cca cct gct ctt
gtc cac ggt gag ctt gct ggc gag gta gaa gga gcc-3′
CH3A405A407:
(SEQ ID NO: 369)
5′-gtt gtt gaa gac gtt ccc ctg ctg cca cct gct ctt
gtc cac ggt gag ctt gct ggc gag ggc gaa gga gcc-3′

[0306] The template was the mutant hinge MHWTCH2CH3 human IgG1. The 5′ PCR oligonucleotide primer was huIgGMHWC, (SEQ ID NO: 332). The amplified products were TOPO® cloned and sequenced as described in Examples 1 and 10. DNA from the clones with the correct sequence was digested with BclI and XmnI and transferred to pShuttle containing the MTH WTCH2CH3 sequence, which was also digested with the same restriction enzymes. The mutated IgG sequences were then removed by digestion with BclI and XbaI and inserted into a pD18 vector containing 2H7 scFv that was also digested with BclI and XbaI. The polynucleotide sequences for mutated the CH3 domains, MTCH3 Y405, MTCH3 A405, MTCH3 A407, MTCH3 Y405A407, and MTCH3 A405A407 are shown in SEQ ID NOs: 370, 371, 372, 373, 374, respectively, and the polypeptide sequences for each are shown in SEQ ID NOs: 375, 376, 377, 378, 379 respectively. The polynucleotide sequences for the 2H7 scFv MTH WTCH2 MTCH3 Y405, 2H7 scFv MTH WTCH2 MTCH3 A405, scFv MTH WTCH2 MTCH3 A407, scFv MTH WTCH2 MTCH3 Y405A407, and scFv MTH WTCH2 MTCH3 A405A407 are shown in SEQ ID NOs: 381, 380, 383, 384, 382, respectively, and the deduced amino acid sequences are shown in SEQ ID NOs: 386, 385, 387, 388 389, respectively.

### Example 22

### Construction of 2H7 scFv IgG Fusion Proteins with Hinge Mutations

[0307] A 2H7 scFv IgG fusion protein was constructed with the third cysteine residue in the IgG1 hinge region substituted with a serine residue. The template for introduction of the mutations was a polynucleotide encoding 2H7 scFv WTH WTCH2CH3 (SEQ ID NO: 2, 239). The oligonucleotide introducing the mutations was a 5′ PCR primer oligonucleotide HIgGMHcys3 having the sequence 5′-gtt gtt gat cag gag ccc aaa tct tgt gac aaa act cac aca tgt cca ccg tcc cca gca cct-3′ (SEQ ID NO: 589). The oligonucleotide introducing the mutation into the hinge region was combined with template and a 3′ oligonucleotide containing an XbaI site (underlined and italicized) (5′-gtt gtt tct aga tca ttt acc cgg aga cag gga gag gct ctt ctg cgt gta g-3′ (SEQ ID NO: 278)) to amplify the mutant hinge-wild type (WT)-CH2-CH3 sequences by PCR. The IgG MTH CCS mutant sequence was amplified for 30 cycles with a denaturation profile of 94° C., annealing at 50° C. for 30 seconds, and extension at 72° C. for 30 seconds. The amplified polynucleotides were inserted into the TOPO® cloning vector (Invitrogen Life Technologies) and then were sequenced as described in Example 1 to confirm the presence of the mutation. pD18 vector containing 2H7 scFv was digested to remove the constant region sequences essentially as described in Example 10. The mutant hinge-wild type CH2-CH3 regions were inserted in frame into the digested vector DNA to obtain vectors comprising 2H7 scFv MTH (CCS) WTCH2CH3 encoding DNA (SEQ ID NO: 395). The deduced polypeptide sequence is shown in SEQ ID NO: 398.

### Example 23

### Construction of Anti-CD20 IgE Fusion Proteins

[0308] A binding domain is fused to IgE constant region sequences such that the expressed polypeptide is capable of inducing an allergic response mechanism. The single chain Fv nucleotide sequence of 40.2.220 (SEQ ID NO: 466), an anti-CD40 antibody, is fused to IgE CH2-CH3-CH4 according to methods described for other scFv immunoglobulin constant region constructs (see Examples 1, 5, 10, and 13). To PCR amplify the IgE CH2-CH3-CH4 domains, a 5′ oligonucleotide primer, hIgE5Bcl, having the sequence 5′-gtt gtt gat cac gtc tgc tcc agg gac ttc acc cc-3′, and a 3′ oligonucleotide primer, hIgE3stop, having the sequence 5′-gtt gtt tct aga tta act ttt acc ggg att tac aga cac cgc tcg ctg g-3′ are used.

[0309] The retroviral transfection system for ectopic surface expression of genetically engineered cell surface receptors composed of scFvs that bind costimulatory receptors described in Example 12 is used to construct a 40.2.220 scFv IgE-CD80 fusion protein. The 40.2.220 scFv IgE fusion polynucleotide sequence is fused in frame to sequences encoding the transmembrane domain and cytoplasmic tail of human CD80 (SEQ ID NO: 460), such that when the fusion protein is expressed in the transfected cell, CD80 provided an anchor for surface expression of the scFv Ig fusion protein. cDNA encoding the anti-CD40 scFv-IgE-CD80 fusion proteins is inserted into the retroviral vector pLNCX (BD Biosciences Clontech) according to standard molecular biology procedures and vendor instructions. The 40.2.220 scFv-Ig-CD80 cDNA is inserted between the 5′LTR-neomycin resistance gene-CMV promoter sequences and the 3′LTR sequence. The retroviral constructs are transfected into a carcinoma cell line, and transfected cells are screened to select clones that are expressing the 40.2.220 scFv-Ig-CD80 fusion protein on the cell surface.

### Example 24

### Construction of IgA-T4 Mutants that are Expressed on the Cell Surface

[0310] The retroviral transfection system for ectopic surface expression of genetically engineered cell surface receptors composed of scFvs that bind costimulatory receptors described in Example 12 is used to construct a 2H7 scFv IgA hinge IgA-T4-CD80 fusion protein. The 2H7 scFv IgAH IgA-T4 fusion polynucleotide sequence (SEQ ID NO: 298) is fused in frame to sequences encoding the transmembrane domain and cytoplasmic tail of human CD80 (SEQ ID NO: 460), such that when the fusion protein is expressed in the transfected cell, CD80 provided an anchor for surface expression of the scFv Ig fusion protein. cDNA encoding the 2H7 scFv IgAH IgA-T4-CD80 fusion protein (SEQ ID NO: 299) is inserted into the retroviral vector pLNCX (BD Biosciences Clontech) according to standard molecular biology procedures and vendor instructions. The 2H7 scFv IgAH IgA-T4-CD80 cDNA is inserted between the 5′LTR-neomycin resistance gene-CMV promoter sequences and the 3′LTR sequence. The retroviral construct is transfected into Reh, an acute lymphocytic leukemia cell line (ATCC CRL-8286). Transfected cells are screened to select clones that are expressing 2H7 scFv-Ig fusion proteins on the cell surface.

### Example 25

### Characterization of an Anti-4-1BB scFv Ig-CD80 Fusion Protein Expressed on the Cell Surface of Tumor Cells and Growth of the Tumor Cells In Vivo

[0311] This example describes construction of an anti-murine 4-1BB (CD137) scFv fusion protein that has an IgG wild type hinge and CH2 and CH3 domains that is fused to the CD80 transmembrane and cytoplasmic domains. The Example also illustrates the effect of the cell surface expression of the anti-4-1BB scFv IgG CD80 polypeptide when the transfected tumor cells are transplanted into mice.

[0312] The heavy and light chain variable regions of a rat anti-4-1BB (CD137) monoclonal antibody (1D8) were cloned, and a single chain Fv construct was prepared essentially as described in Example 1. The heavy chain and light chain variable regions of each antibody were cloned according to standard methods for cloning immunoglobulin genes and as described in Example 1. Single chain Fv construct was prepared as described in Example 1 by inserting a nucleotide sequence encoding a (gly₄ser)₃ peptide linker between the VL region nucleotide sequence of 1D8 (SEQ ID NOS: 336, 549) and the VH region nucleotide sequence of 1D8 (SEQ ID NOS: 333, 547). The polypeptide sequence for 1D8 VL is shown in SEQ ID NOS: 342, 550, and the polypeptide sequence for the VH domain is shown in SEQ ID NOS: 341, 548. The scFv polynucleotide (SEQ ID NO: 337) was then fused to human IgG1 wild-type hinge-CH2-CH3 domains according to the methods described in Example 1. The scFv IgG1 fusion polynucleotide sequence was then fused in frame to sequences encoding the transmembrane domain and cytoplasmic tail of human CD80 (SEQ ID NO: 460) essentially as described in Example 12, such that when the fusion protein was expressed in the transfected cell, CD80 provided an anchor for surface expression of the scFv Ig fusion protein. cDNA encoding the scFv-IgG-CD80 fusion protein (SEQ ID NO: 340) was inserted into the retroviral vector pLNCX (BD Biosciences Clontech) according to standard molecular biology procedures and vendor instructions. The scFv-Ig-CD80 cDNA was inserted between the 5′LTR-neomycin resistance gene-CMV promoter sequences and the 3′LTR sequence.

[0313] The retroviral constructs were transfected into the metastatic M2 clone of K1735, a melanoma cell line, provided by Dr. I. Hellstrom, PNRI, Seattle, Wash. Transfected cells were screened to select clones that were expressing scFv-Ig fusion proteins on the cell surface. To demonstrate that the 1D8 scFv IgG-CD80 construct was expressed on the cell surface of the tumor cells, the transfected cells were analyzed by flow immunocytofluorimetry. Transfected cells (K1735-1D8) were incubated for one hour on ice in phycoerythrin-conjugated F(ab′)₂ goat anti-human IgG. The unbound conjugate was then removed by washing the cells and flow cytometry analysis was performed using a Coulter Epics XL cell sorter. Results are presented in FIG. 41A.

[0314] The growth of K1735-1D8 transfected cells was examined in vivo. K1735-WT cells grew progressively when transplanted subcutaneously (s.c.) in naïve C3H mice. Although the same dose of K1735-1D8 cells initially formed tumors of an approximately 30 mm² surface area, the tumors started to regress around day 7 and had disappeared by day 20 as shown in FIG. 41B. Tumor cells that were transfected with a similarly constructed vector encoding a non-binding scFv, a human anti-CD28 scFv construct, grew as well as tumor cells that had not been transfected. The presence of a foreign protein, that is, human IgG1 constant domains or rat variable regions, did not make transfected K1735-WT cells immunogenic; the growth of the K1735-1D8 cells in C3H mice was identical to that of K1735-WT cells (untransfected).

[0315] To investigate the roles of CD4⁺ and CD8⁺ T lymphocytes and NK cells in the regression of K1735-1D8 tumors, naïve mice were injected intraperitoneally (i.p.) with monoclonal antibodies (mAbs, typically 50 μg in a volume 0.1 ml) to remove CD8⁺, CD4⁺ or both CD4⁺ and CD8⁺ T cells, or were injected with anti-asialo-GM1 rabbit antibodies to remove NK cells. Twelve days later, when flow cytometry analysis of spleen cells from identically treated mice showed that the targeted T cell populations were depleted, K1735-1D8 cells were transplanted s.c to each T cell-depleted group. K1735-1D8 had similar growth kinetics in mice that had been injected with the anti-CD8 MAb or control rat IgG while removal of CD4⁺ T cells resulted in the growth of K1735-1D8 with the same kinetics as K1735-WT. This failure to inhibit tumor growth after CD4+ T cell removal was observed regardless of the presence or absence of CD8+ T cells. K1735-1D8 grew in all NK-depleted mice, although more slowly than in the CD4-depleted group. The results are presented in FIG. 41C.

### Example 26

### Therapeutic Effect of Tumor Cells Expressing Anti-4-1BB scFv IgG-CD80 Fusion Protein

[0316] This Example examines the ability of K1735-1D8 transfected tumor cells expressing an anti-CD137 scFv on the cell surface to generate a sufficient immune response in mice to mediate rejection of established, untransfected wild type tumors. C3H mice were transplanted with K1735-WT tumors (2×10⁶ cells/animal) and grown for approximately six days. Experiments were performed using mice with established K1735-WT tumors of 30 mm² surface area. Mice were vaccinated by s.c. injection of K1735-1D8 or irradiated K1735-WT cells on the contralateral side. Identical injections were repeated at the time points indicated in FIG. 42. One group of animals was given four weekly injections of K1735-1D8 cells. According to the same schedule, another group was given irradiated (12,000 rads) K1735-WT cells, and a third group was injected with PBS. The data are plotted in FIG. 42. The WT tumors grew progressively in all control mice and in all mice that received irradiated K1735-WT cells. In contrast, the tumors regressed in 4 of the 5 mice treated by immunization with K1735-1D8. The animals remained tumor-free and without signs of toxicity when the experiment was terminated 3 months later. In the fifth mouse, the tumor nodule decreased in size as long as the mouse received K1735-1D8 cells, but the tumor grew back after therapy was terminated.

[0317] In another experiment with 5 mice/group, mice were injected intravenously (i.v.) with 3×10⁵ K1735-WT cells to initiate lung metastases. Three days later, K1735-1D8 cells were transplanted s.c. This procedure was repeated once weekly for a month; control mice were injected with PBS. The experiment was terminated when one mouse in the control group died, 37 days after receiving the K1735-WT cells. At that time, lungs of the control mice each had >500 metastatic foci. In contrast, less than 10 metastatic foci were present in the lungs of the immunized mice.

[0318] In a third experiment, mixtures of K1735-WT cells and K1735-1D8 cells were injected into immunocompetent syngeneic C3H mice. Mice were injected subcutaneously with K7135-WT cells alone or with a mixture of 2×10⁶ K1735-WT cells and 2×10⁵ K1735-1D8 cells. Tumor growth was monitored at 5-day intervals.

### Example 27

### Expression of Anti-4-1BB scFv IgG-CD80 Fusion Protein on the Cell Surface of Sarcoma Cells

[0319] This Example demonstrates expression of an anti-CD137 scFv on the cell surface of a second type of tumor cell by transfecting a murine sarcoma cell line with an anti-CD137 scFv IgG-CD80 construct.

[0320] The 1D8 scFv IgG WTH WTCH2CH3-CD80 polynucleotide (SEQ ID NO: 340) was transferred from the pLNCX vector into pCDNA3-hygro vector using restriction enzyme digestion and ligation steps according to standard molecular biology methods. The construct was cut with HindIII+Cla1 and the sFv fragment was filled in with Klenow (Roche) and the blunt-ended fragment was ligated into EcoR5 site of pcDNA3. Ag104 murine sarcoma tumor cells were transfected with the pCDNA3-hygro vector containing the 1D8 scFv IgG CD80 fusion protein. Hygromycin-resistant clones were screened by flow cytometry using a FITC anti-human IgG antibody to detect expression of the transgene. Only approximately 15% of the resistant clones had detectable fusion protein initially. Positive cells identified by flow cytometry were repeatedly panned on flasks coated with immobilized anti-human IgG (10 μg/ml) according to standard methods. Panning was performed by incubating cells on the coated plates for 30 min at 37 C; the plates were then washed 2-3× in versene or PBS. After each round, cells were tested for IgG expression by FACS. The histogram in FIG. 44 shows the staining pattern after four rounds of panning against anti-human IgG (black). Untransfected cells were stained and are indicated in gray. All of the cells in the population were positive.

### Example 28

### Construction and Characterization of a Bispecific scFv Ig Fusion Protein and scFv Ig Fusion Proteins with a Mutation in the IgG1 CH2 Domain

[0321] An anti-CD20 (2H7) scFv IgG fusion protein was constructed that had a mutant hinge (MT (SSS)) and a mutant CH2 domain in which the proline at residue (position number 238 according to Ward et al., supra) was substituted with a serine. The 2H7 scFv IgG MTH (SSS) MTCH2WTCH3 encoding polynucleotide (SEQ ID NO: 3, 351) was constructed essentially according to methods described in Examples 1, 5, and 13. The IgG mutant hinge-mutant CH2-wild type CH3 domains were also fused to an anti-CD20 (2H7)-anti-CD40 (40.2.220) bispecific scFv. The anti-CD20-anti-CD40 scFv IgG MTH (SSS) MTCH2WTCH3 encoding polynucleotide sequence is shown in SEQ ID NO: 349 and the encoded polypeptide is shown in SEQ ID NO: 350.

[0322] COS cells were transiently transfected with vectors comprising the polynucleotide sequences encoding 2H7 scFv IgG MTH (SSS) MTCH2WTCH3 (SEQ ID NO: 3, 351); anti-CD20-anti-CD40 scFv IgG MTH (SSS) MTCH2WTCH3 (SEQ ID NO: 349); 2H7 scFv IgG MTH (SSS) WTCH2CH3 (SEQ ID NO: 4, 225); and 2H7 scFv IgAH IgG WTCH2CH3 (SEQ ID NO: 5, 283) as described in Example 10. Culture supernatants were collected and the fusion proteins were purified by protein A chromatography (see Example 10). The purified polypeptides were fractionated by SDS-PAGE according to the method described in Example 10. Rituximab (anti-CD20 monoclonal antibody), and Bio-Rad prestained molecular weight standards (Bio-Rad, Hercules, Calif.), and Multimark® molecular weight standards (Invitrogen Life Technologies were also applied to the gel. The results are presented in FIG. 45.

[0323] The 2H7 scFv Ig fusion protein that contains a mutation in the CH2 domain was compared to fusion proteins that have the wild type CH2 domain in an ADCC assay. The assays were performed essentially as described in Examples 11 and 19. Fresh resting PBMC (effector cells) were added to ⁵¹Cr-labeled BJAB cells (target cells) at the ratios indicated in FIG. 46. Purified 2H7 scFv IgG MTH (SSS) MTCH2WTCH3, 2H7 scFv IgG MTH (SSS) WTCH2CH3, 2H7 scFv IgAH IgG WTCH2CH3, and Rituximab, each at 10 μg/ml were added to the effector/target cell mixtures and incubated for five hours at 37° C. Supernatants were harvested and the amount of chromium released was determined as described in Examples 11 and 19. Percent specific killing by each fusion protein is presented in FIG. 46.

### Example 29

### Tumor Cell Surface Expression of an Anti-Human CD3 scFv IgG Fusion Protein

[0324] An anti-human CD3 scFv Ig CD80 fusion protein was prepared essentially as described in Examples 1 and 12. The fusion protein comprised an anti-human CD3 scFv fused to wild type IgG1 hinge (SEQ ID NO: 436, 438) and wild type CH2 (SEQ ID NO: 440) and CH3 (SEQ ID NO: 442) domains, fused to CD80 transmembrane and cytoplasmic domains (SEQ ID NO: 461) to enable cell surface expression of the anti-CD3 scFv. The anti-human CD3 scFv IgG WTH WTCH2CH3-CD80 polynucleotide (SEQ ID NO: 559) encoding the polypeptide (SEQ ID NO: 560) was transfected in Reh cells and into T51 cells (lymphoblastoid cell line). Expression of the anti-human CD3 scFv IgG fusion protein was detected by flow cytometry using FITC conjugated goat anti-human IgG (see methods in Examples 4, 10, 16, 18). FIG. 47A illustrates expression of the anti-human CD3 fusion protein on the cell surface of Reh cells, and FIG. 47B shows expression of the fusion protein on T41 cells.

[0325] ADCC assays were performed with the transfected Reh and T51 cells to determine if expression of the scFv-Ig polypeptides on the cell surface augmented effector cell function. Untransfected and transfected Reh cells and untransfected and transfected T51 cells were pre-labeled with ⁵¹Cr (100 μCi) (Amersham) for two hours at 37° C. Human PBMC served as effector cells and were added to the target cells (5×10⁴ cells per well of 96 well plate) at ratios of 20:1, 10:1, 5:1, and 2.5:1. After four hours at 37° C., culture supernatants were harvested and analyzed as described in Examples 11 and 12. Percent specific killing was calculated as described in Example 12. The results are presented in FIG. 48.

### Example 30

### Induction of Cytokine Expression in Tumor Cells Expressing Anti-CD28 scFv on the Cell Surface

[0326] This Example describes the effect of cell surface expressed scFv on cytokine mRNA induction in stimulated lymphocytes co-cultured with tumor cells transfected with an anti-human CD28 scFv IgG-CD80 fusion protein.

[0327] Real time PCR analysis was performed on RNA samples from human PBMC stimulated with Reh, Reh-anti-CD28 (2e12) (see Example 12 for construction of 2e12 scFv IgG WTH WHTCH3CH2-CD80 and transfection of Reh cells), and Reh-CD80 (see Example 14) in order to measure the effects of the surface expressed scFv on cytokine production by the PBMC effector cells. For the real-time PCR assay, SYBR Green (QIAGEN) (Morrison et al., Biotechniques 24:954-8, 960, 962 (1998)) was used and measured by an ABI PRISM® 7000 Sequence Detection System (Applied Biosystems, Foster City, Calif.) that measures the formation of PCR product after each amplification cycle. Cells were harvested from cultures and total RNA prepared using QIAGEN RNA kits, including a QIA shredder column purification system to homogenize cell lysates, and RNeasy® mini-columns for purification of RNA. cDNA was reverse transcribed using equal amounts of RNA from each cell type and Superscript II Reverse Transcriptase (Life Technologies). SYBR Green real-time PCR analysis was then performed using the prepared cDNA as template and primer pairs specific for cytokine gene products. The average length of the PCR products that were amplified ranged from 150-250 base pairs. The cDNA levels for many activation response molecules including IFNγ, TNFα, GM-CSF, IL-4, IL-5, IL-6, IL-8, IL-10, IL-12, IL-15, ICOSL, CD80 and CD86 were assayed. Control reference cDNAs for constitutively expressed genes, including GAPDH, β-actin, and CD3ε were measured in each assay. The most significant induction of specific mRNA was observed for IFN-γ, and more modest induction was observed for CTLA-4 and ICOS.

### Example 31

### Cloning of an Anti-Human 4-1BB Antibody and Construction of an Anti-Human 4-1BB scFv Ig Fusion Protein

[0328] A hybridoma cell line expressing a mouse anti-human monoclonal antibody (designated 5B9) was obtained from Dr. Robert Mittler, Emory University Vaccine Center, Atlanta, Ga. The variable heavy and light chain regions were cloned according to known methods for cloning of immunoglobulin genes and as described herein. Cells were grown in IMDM/15% FBS (Invitrogen Life Technologies) media for several days. Cells in logarithmic growth were harvested from cultures and total RNA prepared using QIAGEN RNA kits, including a QIA shredder column purification system to homogenize cell lysates, and RNeasy® mini-columns for purification of RNA according to manufacturer's instructions. cDNA was reverse transcribed using random hexamer primers and Superscript II Reverse Transcriptase (Invitrogen Life Technologies).

[0329] cDNA was anchor-tailed using terminal transferase and dGTP. PCR was then performed using an anchor-tail complementary primer and a primer that annealed specifically to the antisense strand of the constant region of either mouse Ck (for amplification of VL) or the appropriate isotype mouse CH1 (for amplification of VH). The amplified variable region fragments were TOPO® cloned (Invitrogen Life Technologies), and clones with inserts of the correct size were then sequenced. Consensus sequence for each variable domain was determined from sequence of at least four independent clones. The 5B9 VL and VH polynucleotide sequences are shown in SEQ ID NOs: 355 and 354, respectively, and the deduced amino acid sequences are shown in SEQ ID NOs: 361 and 360. The scFv was constructed by a sewing PCR method using overlapping primers containing a synthetic (gly₄ser)₃ linker domain inserted between the light and heavy chain variable regions (see Example 1). The 5B9 scFv polypeptide (SEQ ID NO: 356) is encoded by the polynucleotide sequence comprising SEQ ID NO: 362.

[0330] 5B9 scFv polynucleotide sequence was fused in frame to the polynucleotide sequence encoding the human IgG1 mutant hinge and wild type CH2 and CH3 (MTH (SSS) WTCH2CH3, SEQ ID NO: 357) according to methods described in Examples 5, 10, and 13. COS cells were transiently transfected with a vector comprising the 5B9 scFv IgG MTH (SSS) WTCH2CH3 polynucleotide sequence (SEQ ID NO: 357). Supernatant was collected and binding of the 5B9 scFv IgG MTH (SSS) WTCH2CH3 polypeptide (SEQ ID NO: 362) was measured by flow immunocytofluorimetry essentially as described in Examples 4, 10, 16, and 18. Culture supernatant from the 5B9 hybridoma cell line was also included in the binding assay. Fresh human PBMC were incubated in the presence of immobilized anti-CD3 for four days prior to the binding experiment to induce expression of CD137 on the surface of activated T cells. Stimulated PBMC were washed and incubated with COS or hybridoma culture supernatant containing the 5B9 scFv IgG fusion protein or 5B9 murine monoclonal antibody, respectively, for 1 hour on ice. Binding of 5B9 scFv IgG fusion protein or 5B9 murine monoclonal antibody was detected with FITC conjugated anti-human IgG or anti-mouse IgG, respectively. The results are presented in FIG. 49.

### Example 32

### Construction of 2H7 scFv IgG Fusion Proteins with Hinge Mutations

[0331] 2H7 scFv IgG fusion proteins are constructed with the first cysteine residue and the second cysteine in the IgG1 hinge region substituted with a serine residue to provide MTH (SCC) and MTH (CSC). The template for introduction of the mutations is a polynucleotide encoding 2H7 scFv WTH WTCH2CH3 (SEQ ID NO: 2, 207). The oligonucleotide introducing the mutations are 5′ PCR primer oligonucleotides HIgGMHcys1 (SEQ ID NO: 587) and HIgGMHcys2 (SEQ ID NO: 391). The encoding polynucleotides of the mutants are presented in SEQ ID NOs: 393, 394 and the polypeptide sequences are provided in SEQ ID NO: 396, 397.

[0332] Additional representative sequences of the present invention are as follows:

HuIgG1 wild type hinge, CH2, CH3 (SEQ ID NO: 427)
tctgatcaggagcccaaatcttgtgacaaaactcacacatgcccaccgtgcccagcacctgaactcctgggg
ggaccgtcagtcttcctcttccccccaaaacccaaggacaccctcatgatctcccggacccctgaggtcacatgcgtggtggtgga
cgtgagccacgaagaccctgaggtcaagttcaactggtacgtggacggcgtggaggtgcataatgccaagacaaagccgcggg
aggagcagtacaacagcacgtaccgtgtggtcagcgtcctcaccgtcctgcaccaggactggctgaatggcaaggagtacaagt
gcaaggtctccaacaaagccctcccagcccccatcgagaaaacaatctccaaagccaaagggcagccccgagaaccacaggtg
tacaccctgcccccatcccgggatgagctgaccaagaaccaggtcagcctgacctgcctggtcaaaggcttctatcccagcgaca
tcgccgtggagtgggagagcaatgggcagccggagaacaactacaagaccacgcctcccgtgctggactccgacggctccttct
tcctctacagcaagctcaccgtggacaagagcaggtggcagcaggggaacgtcttctcatgctccgtgatgcatgaggctctgca
caaccactacacgcagaagagcctctccctgtctccgggtaaatgatctaga
HuIgG1 wild type hinge, CH2, CH3 (SEQ ID NO: 428)
sdqepkscdkthtcppcpapellggpsvflfppkpkdtlmisrtpevtcvvvdvshedpevkfnwyvd
gvevhnaktkpreeqynstyrvvsvltvlhqdwlngkeykckvsnkalpapiektiskakgqprepqvytlppsrdeltknqv
sltclvkgfypsdiavewesngqpennykttppvldsdgsfflyskltvdksrwqqgnvfscsvmhealhnhytqkslslspgk
Llama IgG1 hinge, CH2, CH3 (SEQ ID NO: 429)
tgatcaagaaccacatggaggatgcacgtgcccncagtgcccncaatgcccngcnccngaactnccagg
aggcccttctgtctttgtcttccccccgaaacccaaggacgtcctctccatttttggaggccgagtcacgtgcgttgtagtggacgtcg
gaaagaaagaccccgaggtcaatttcaactggtatattgatggcgttgaggtgcgaacggccaatacgaagccaaaagaggaac
agttcaacagcacgtaccgcgtggtcagcgtcctgcccatccagcaccaggactggctgacggggaaggaattcaagtgcaagg
tcaacaacaaagctctcccggcccccatcgagaggaccatctccaaggccaaagggcagacccgggagccgcaggtgtacacc
ctggccccacaccgggaagaactggccaaggacaccgtgagcgtaacatgcctggtcaaaggcttctacccagctgacatcaac
gttgagtggcagaggaacggtcagccggagtcagagggcacctacgccaacacgccgccacagctggacaacgacgggacct
acttcctctacagcaagctctcggtgggaaagaacacgtggcagcggggagaaaccttaacctgtgtggtgatgcatgaggccct
gcacaaccactacacccagaaatccatcacccagtcttcgggtaaatagtaatctaga
Llama IgG1 hinge, CH2, CH3 (In FIG. 23 as Llama IgG1) (SEQ ID NO:
430)
ephggctcpqcpapelpggpsvfvfppkpkdvlsisgrpevtcvvvdvgkedpevnfnwyidgvevr
tantkpkeeqfnstyrvvsvlpiqhqdwltgkefkckvnnkalpapiertiskakgqtrepqvytlaphreelakdtvsvtclvk
gfypadinvewqrngqpesegtyantppqldndgtyflysrlsvgkntwqrgetltgvvmhealhnhytqksitqssgk
Llama IgG2: (SEQ ID NO: 431)
tgatcaagaacccaagacaccaaaaccacaaccacaaccacaaccacaacccaatcctacaacagaatcc
aagtgtcccaaatgtccagcccctgagctcctgggagggccctcagtcttcatcttccccccgaaacccaaggacgtcctctccattt
ctgggaggcccgaggtcacgtgcgttgtggtagacgtgggccaggaagaccccgaggtcagtttcaactggtacattgatggcgc
tgaggtgcgaacggccaacacgaggccaaaagaggaacagttcaacagcacgtaccgcgtggtcagcgtcctgcccatccagc
accaggactggctgacggggaaggaattcaagtgcaaggtcaacaacaaagctctcccggcccccatcgagaagaccatctcca
aggccaaagggcagacccgggagccgcaggtgtacaccctggccccacaccgggaagagctggccaaggacaccgtgagc
gtaacatgcctggtcaaaggcttctacccacctgatatcaacgttgagtggcagaggaatgggcagccggagtcagagggcacyt
acgccaccacgccaccccagctggacaacgacgggacctacttcctctacagcaagctctcggtgggaaagaacacgtggcag
cagggagaaaccttcacctgtgtggtgatgcacgaggccctgcacaaccactacacccagaaatccatcacccagtcttcgggta
aatagtaatctaga
Llama IgG2 (SEQ ID NO: 432)
Dqepktpkpqpqpqpqpnptteskcpkcpapellggpsvfifppkpkdvlsisgrpevtcvvvdvgq
edpevsfnwyidgaevrtantrpkeeqfnstyrvvsvlpiqhqdwltgkefkckvnnkalpapiektiskakgqtrepqvytla
phreelakdtvsvtclvkgfyppdinvewqrngqpesegtyattppqldndgtyflysklsvgkntwqqgetftcvvmhealh
nhytqksitqssgk
Llama IgG3 Fc (SEQ ID NO: 433)
tgatcaagcgcaccacagcgaagaccccagctccaagtgtcccaaatgcccaggccctgaactccttgga
gggcccacggtcttcatcttccccccgaaagccaaggacgtcctctccatcacccgaaaacctgaggtcacgtgcttgtggtggac
gtgggtaaagaagaccctgagatcgagttcaagctggtccgtggatgacacagaggtacacacggctgagacaaagccaaagg
aggaacagttcaacagcacgtaccgcgtggtcagcgtcctgcccatccagcaccaggactggctgacggggaaggaattcaagt
gcaaggtcaacaacaaagctctcccagcccccatcgagaggaccatctccaaggccaaagggcagacccgggagccgcaggt
gtacaccctggccccacaccgggaagagctggccaaggacaccgtgagcgtaacctgcctggtcaaaggcttcttcccagctga
catcaacgttgagtggcagaggaatgggcagccggagtcagagggcacctacgccaacacgccgccacagctggacaacgac
gggacctacttcctctacagcaaactctccgtgggaaagaacacgtggcagcagggagaagtcttcacctgtgtggtgatgcacg
aggctctacacaatcactccacccagaaatccatcacccagtcttcgggtaaatagtaatctagagggccc
Llama IgG3 Fc (SEQ ID NO: 434)
dqahhsedpsskcpkcpgpellggptvfifppkakdvlsitrkpevtclwwtwvkktlrsssswsvddt
evhtaetkpkeeqfnstyrvvsvlpiqhqdwltgkefkckvnnkalpapiertiskakgqtrepqvytlaphreelakdtvsvtc
lvkgffpadinvewqrngqpesegtyantppqldndgtyflysklsvgkntwqqgevftcvvmhealhnhstqksitqssgk
HuIgG1 wild type hinge (SEQ ID NO: 435)
gatcaggagcccaaatcttgtgacaaaactcacacatgcccaccgtgcccagca
HuIgG1 wild type hinge (SEQ ID NO: 436)
dqepkscdkthtcppcpa
HuIgG1 H2, wild type hinge with leu at second position (results from BglI
site) (SEQ ID NO: 437)
gatctggagcccaaatcttgtgacaaaactcacacatgcccaccgtgcccagca
HuIgG1 H2, wild type hinge with leu at second position. (SEQ ID NO: 438)
dlepkscdkthtcppcpa
NT
HuIgG1 wild type CH2 (SEQ ID NO: 439)
cctgaactcctggggggaccgtcagtcttcctcttccccccaaaacccaaggacaccctcatgatctcccgg
acccctgaggtcacatgcgtggtggtggacgtgagccacgaagaccctgaggtcaagttcaactggtacgtggacggcgtggag
gtgcataatgccaagacaaagccgcgggaggagcagtacaacagcacgtaccgtgtggtcagcgtcctcaccgtcctgcaccag
gactggctgaatggcaaggagtacaagtgcaaggtctccaacaaagccctcccagcccccatcgagaaaaccatctccaaagcc
aaa
HuIgG1 wild type CH2 AA (SEQ ID NO: 440)
pellggpsvflfppkpkdtlmisrtpevtcvvvdvshedpevkfnwyvdgvevhnaktkpreeqynst
yrvvsvltvlhqdwlngkeykckvsnkalpapiektiskak
NT HuIgG1 wild type CH3 (SEQ ID NO: 441)
gggcagccccgagaaccacaggtgtacaccctgcccccatcccgggaggagatgaccaagaaccaggt
cagcctgacctgcctggtcaaaggcttctatcccagcgacatcgccgtggagtgggagagcaatgggcagccggagaacaacta
caagaccacgcctcccgtgctggactccgacggctccttcttcctctatagcaagctcaccgtggacaagagcaggtggcagcag
gggaacgtcttctcatgctccgtgatgcatgaggctctgcacaaccactacacgcagaagagcctctccctgtccccgggtaaatga
AA HuIgG1 wild type CH3 (SEQ ID NO: 442)
gqprepqvytlppsreemtknqvsltclvkgfypsdiavewesngqpennykttppvldsdgsfflysk
ltvdksrwqqgnvfscsvmhealhnhytqkslslspgk
NT HuIgG1 mutated hinge (C-C-C→S-S-S) (SEQ ID NO: 443)
gatcaggagcccaaatcttctgacaaaactcacacatccccaccgtccccagca
AA HuIgG1 mutated hinge (C-C-C→S-S-S) (SEQ ID NO: 444)
dqepkssdkthtsppspa
Mutant hinge, but wild type CH2 and CH3— reads from the hinge + Ig tail,
HIgG1MTH WTCH2CH3 (SEQ ID NO: 445):
tgatcaccccaaatcttctgacaaaactcacacatctccaccgtcctcagcacctgaactcctgggtggaccg
tcagtcttcctcttccccccaaaacccaaggacaccctcatgatctcccggacccctgaggtcacatgcgtggtggtggacgtgag
ccacgaagaccctgaggtcaagttcaactggtacgtggacggcgtggaggtgcataatgccaagacaaagccgcgggaggagc
agtacaacagcacgtaccgtgtggtcagcgtcctcaccgtcctgcaccaggactggctgaatggcaaggagtacaagtgcaaggt
ctccaacaaagccctcccagcccccatcgagaaaacaatctccaaagccaaagggcagccccgagaaccacaggtgtacaccc
tgcccccatcccgggatgagctgaccaagaaccaggtcagcctgacctgcctggtcaaaggcttctatcccagcgacatcgccgt
ggagtgggagagcaatgggcagccggagaacaactacaagaccacgcctcccgtgctggactccgacggctccttcttcctcta
cagcaagctcaccgtggacaagagcaggtggcagcaggggaacgtcttctcatgctccgtgatgcatgaggctctgcacaacca
ctacacgcagaagagcctctccctgtctccgggtaaatgataatctaga
Protein sequence: Mutant hinge, but wild type CH2 and CH3 (SEQ ID NO:
446)
dhpkssdkthtsppssapellggpsvflfppkpkdtlmisrtpevtcvvvdvshedpevkfnwyvdgv
evhnaktkpreeqynstyrvvsvltvlhqdwlngkeykckvsnkalpapiektiskakgqprepqvytlppsrdeltknqvslt
clvkgfypsdiavewesngqpennykttppvldsdgsfflyskltvdksrwqqgnvfscsvmhealhnhytqkslslspgk
LLG1-5′bgl 35 mer Llama IgG1 5′ (SEQ ID NO: 447)
5′-gtt gtt gat caa gaa cca cat gga gga tgc acg tg-3′
LLG2-5′bgl 32 mer, Llama IgG2-5′ (SEQ ID NO: 448)
5′-gtt gtt gat caa gaa ccc aag aca cca aaa cc-3′
LLG3-5′bgl 33 mer, Llama IgG3-5′ (SEQ ID NO: 449)
5′-gtt gtt gat caa gcg cac cac agc gaa gac ccc-3′
LLseqsense 19mer, llama sequencing primer (SEQ ID NO: 450)
5′-ctg aga tcg agt tca gct g-3′
LLseqAS 19 mer (SEQ ID NO: 451)
5′-cct cct ttg gct ttg tct c-3′
NT
2H7 scFv llama IgG1 (SEQ ID NO: 452)
aagcttgccgccatggattttcaagtgcagattttcagcttcctgctaatcagtgcttcagtcataattgccagag
gacaaattgttctctcccagtctccagcaatcctgtctgcatctccaggggagaaggtcacaatgacttgcagggccagctcaagtg
taagttacatgcactggtaccagcagaagccaggatcctcccccaaaccctggatttatgccccatccaacctggcttctggagtcc
ctgctcgcttcagtggcagtgggtctgggacctcttactctctcacaatcagcagagtggaggctgaagatgctgccacttattactg
ccagcagtggagttttaacccacccacgttcggtgctgggaccaagctggagctgaaagatggcggtggctcgggcggtggtgg
atctggaggaggtgggagctctcaggcttatctacagcagtctggggctgagctggtgaggcctggggcctcagtgaagatgtcct
gcaaggcttctggctacacatttaccagttacaatatgcactgggtaaagcagacacctagacagggcctggaatggattggagct
atttatccaggaaatggtgatacttcctacaatcagaagttcaagggcaaggccacactgactgtagacaaatcctccagcacagcc
tacatgcagctcagcagcctgacatctgaagactctgcggtctatttctgtgcaagagtggtgtactatagtaactcttactggtacttc
gatgtctggggcacagggaccacggtcaccgtctcttctgatcaagaaccacatggaggatgcacgtgcccncagtgcccncaat
gcccngcnccngaactnccaggaggcccttctgtctttgtcttccccccgaaacccaaggacgtcctctccatttttggaggccga
gtcacgtgcgttgtagtggacgtcggaaagaaagaccccgaggtcaatttcaactggtatattgatggcgttgaggtgcgaacggc
caatacgaagccaaaagaggaacagttcaacagcacgtaccgcgtggtcagcgtcctgcccatccagcaccaggactggctgac
ggggaaggaattcaagtgcaaggtcaacaacaaagctctcccggcccccatcgagaggaccatctccaaggccaaagggcaga
cccgggagccgcaggtgtacaccctggccccacaccgggaagaactggccaaggacaccgtgagcgtaacatgcctggtcaa
aggcttctacccagctgacatcaacgttgagtggcagaggaacggtcagccggagtcagagggcacctacgccaacacgccgc
cacagctggacaacgacgggacctacttcctctacagcaagctctcggtgggaaagaacacgtggcagcggggagaaaccttaa
cctgtgtggtgatgcatgaggccctgcacaaccactacacccagaaatccatcacccagtcttcgggtaaatagtaatctaga
AA 2H7 scFv llama IgG1 (SEQ ID NO: 453)
mdfqvqifsfllisasviiargqivlsqspailsaspgekvtmtcrasssvsymhwyqqkpgsspkpwiy
apsnlasgvparfsgsgsgtsysltisrveaedaatyycqqwsfnpptfgagtklelkdgggsggggsggggssqaylqqsgae
lvrpgasvkmsckasgytftsynmhwvkqtprqglewigaiypgngdtsynqkfkgkatltvdkssstaymqlssltsedsa
vyfcarvvyysnsywyfdvwgtgttvtvssdqephggctcpqcpapelpggpsvfvfppkpkdvlsifggrvtcvvvdvgk
kdpevnfnwyidgvevrtantkpkeeqfnstyrvvsvlpiqhqdwltgkefkckvnnkalpapiertiskakgqtrepqvytl
aphreelakdtvsvtclvkgfypadinvewqrngqpesegtyantppqldndgtyflysklsvgkntwqrgetltcvvmheal
hnhytqksitqssgk
NT 2H7 scFv llama IgG2 (SEQ ID NO: 454)
aagcttgccgccatggattttcaagtgcagattttcagcttcctgctaatcagtgcttcagtcataattgccagag
gacaaattgttctctcccagtctccagcaatcctgtctgcatctccaggggagaaggtcacaatgacttgcagggccagctcaagtg
taagttacatgcactggtaccagcagaagccaggatcctcccccaaaccctggatttatgccccatccaacctggcttctggagtcc
ctgctcgcttcagtggcagtgggtctgggacctcttactctctcacaatcagcagagtggaggctgaagatgctgccacttattactg
ccagcagtggagttttaacccacccacgttcggtgctgggaccaagctggagctgaaagatggcggtggctcgggcggtggtgg
atctggaggaggtgggagctctcaggcttatctacagcagtctggggctgagctggtgaggcctggggcctcagtgaagatgtcct
gcaaggcttctggctacacatttaccagttacaatatgcactgggtaaagcagacacctagacagggcctggaatggattggagct
atttatccaggaaatggtgatacttcctacaatcagaagttcaagggcaaggccacactgactgtagacaaatcctccagcacagcc
tacatgcagctcagcagcctgacatctgaagactctgcggtctatttctgtgcaagagtggtgtactatagtaactcttactggtacttc
gatgtctggggcacagggaccacggtcaccgtctcttctgatcaagaacccaagacaccaaaaccacaaccacaaccacaacca
caacccaatcctacaacagaatccaagtgtcccaaatgtccagcccctgagctcctgggagggccctcagtcttcatcttccccccg
aaacccaaggacgtcctctccatttctgggaggcccgaggtcacgtgcgttgtggtagacgtgggccaggaagaccccgaggtc
agtttcaactggtacattgatggcgctgaggtgcgaacggccaacacgaggccaaaagaggaacagttcaacagcacgtaccgc
gtggtcagcgtcctgcccatccagcaccaggactggctgacggggaaggaattcaagtgcaaggtcaacaacaaagctctcccg
gcccccatcgagaagaccatctccaaggccaaagggcagacccgggagccgcaggtgtacaccctggccccacaccgggaa
gagctggccaaggacaccgtgagcgtaacatgcctggtcaaaggcttctacccacctgatatcaacgttgagtggcagaggaatg
ggcagccggagtcagagggcacytacgccaccacgccaccccagctggacaacgacgggacctacttcctctacagcaagctc
tcggtgggaaagaacacgtggcagcagggagaaaccttcacctgtgtggtgatgcacgaggccctgcacaaccactacacccag
aaatccatcacccagtcttcgggtaaatagtaatctaga
AA
2H7 scFv llama IgG2 (SEQ ID NO: 455)
mdfqvqifsfllisasviiargqivlsqspailsaspgekvtmtcrasssvsymhwyqqkpgsspkpwiy
apsnlasgvparfsgsgsgtsysltisrveaedaatyycqqwsfnpptfgagtklelkdgggsggggsggggssqaylqqsgae
lvrpgasvkmsckasgytftsynmhwvkqtprqglewigaiypgngdtsynqkfkgkatltvdkssstaymqlssltsedsa
vyfcarvvyysnsywyfdvwgtgttvtvssdqepktpkpqpqpqpqpnptteskcpkcpapellggpsvfifppkpkdvlsi
sgrpevtcvvvdvgqedpevsfnwyidgaevrtantrpkeeqfnstyrvvsvlpiqhqdwltgkefkckvnnkalpapiekti
skakgqtrepqvytlaphreelakdtvsvtclvkgfyppdinvewqrngqpesegtyattppqldndgtyflysklsvgkntw
qqgetftcvvmhealhnhytqksitqssgk
NT
2H7 scFv llama IgG3 (SEQ ID NO: 456)
aagcttgccgccatggattttcaagtgcagattttcagcttcctgctaatcagtgcttcagtcataattgccagag
gacaaattgttctctcccagtctccagcaatcctgtctgcatctccaggggagaaggtcacaatgacttgcagggccagctcaagtg
taagttacatgcactggtaccagcagaagccaggatcctcccccaaaccctggatttatgccccatccaacctggcttctggagtcc
ctgctcgcttcagtggcagtgggtctgggacctcttactctctcacaatcagcagagtggaggctgaagatgctgccacttattactg
ccagcagtggagttttaacccacccacgttcggtgctgggaccaagctggagctgaaagatggcggtggctcgggcggtggtgg
atctggaggaggtgggagctctcaggcttatctacagcagtctggggctgagctggtgaggcctggggcctcagtgaagatgtcct
gcaaggcttctggctacacatttaccagttacaatatgcactgggtaaagcagacacctagacagggcctggaatggattggagct
atttatccaggaaatggtgatacttcctacaatcagaagttcaagggcaaggccacactgactgtagacaaatcctccagcacagcc
tacatgcagctcagcagcctgacatctgaagactctgcggtctatttctgtgcaagagtggtgtactatagtaactcttactggtacttc
gatgtctggggcacagggaccacggtcaccgtctcttctgatcaagcgaaccacagcgaagaccccagctccaagtgtcccaaat
gcccaggccctgaactccttggagggcccacggtcttcatcttccccccgaaagccaaggacgtcctctccatcacccgaaaacct
gaggtcacgtgcttgtggtggacgtgggtaaagaagaccctgagatcgagttcaagctggtccgtggatgacacagaggtacaca
cggctgagacaaagccaaaggaggaacagttcaacagcacgtaccgcgtggtcagcgtcctgcccatccagcaccaggactgg
ctgacggggaaggaattcaagtgcaaggtcaacaacaaagctctcccagcccccatcgagaggaccatctccaaggccaaagg
gcagacccgggagccgcaggtgtacaccctggccccacaccgggaagagctggccaaggacaccgtgagcgtaacctgcctg
gtcaaaggcttcttcccagctgacatcaacgttgagtggcagaggaatgggcagccggagtcagagggcacctacgccaacacg
ccgccacagctggacaacgacgggacctacttcctctacagcaaactctccgtgggaaagaacacgtggcagcagggagaagt
cttcacctgtgtggtgatgcacgaggctctacacaatcactccacccagaaatccatcacccagtcttcgggtaaatagtaatctaga
gggccc
AA
2H7 scFv llama IgG3 (SEQ ID NO: 457)
mdfqvqifsfllisasviiargqivlsqspailsaspgekvtmtcrasssvsymhwyqqkpgsspkpwiy
apsnlasgvparfsgsgsgtsysltisrveaedaatyycqqwsfnpptfgagtklelkdgggsggggsggggssqaylqqsgae
lvrpgasvkmsckasgytftsynmhwvkqtprqglewigaiypgngdtsynqkfkgkatltvdkssstaymqlssltsedsa
vyfcarvvyysnsywyfdvwgtgttvtvssdqahshsedpsskcpkcpgpellggptvfifppkakdvlsitrkpevtclwwt
wvkktlrsssswsvddtevhtaetkpkeeqfnstyrvvsvlpiqhqdwltgkefkckvnnkalpapiertiskakgqtrepqv
ytlaphreelakdtvsvtclvkgffpadinvewqrngqpesegtyantppqldndgtyflysklsvgkntwqqgevftcvvm
healhnhstqksitqssgk
2H7 + Completely WT IgG tail:
2H7 scFv WTH WTCH2CH3 (SEQ ID NO: 458)
Nucleotide sequence:
aagcttgccgccatggattttcaagtgcagattttcagcttcctgctaatcagtgcttcagtcataattgccagag
gacaaattgttctctcccagtctccagcaatcctgtctgcatctccaggggagaaggtcacaatgacttgcagggccagctcaagtg
taagttacatgcactggtaccagcagaagccaggatcctcccccaaaccctggatttatgccccatccaacctggcttctggagtcc
ctgctcgcttcagtggcagtgggtctgggacctcttactctctcacaatcagcagagtggaggctgaagatgctgccacttattactg
ccagcagtggagttttaacccacccacgttcggtgctgggaccaagctggagctgaaagatggcggtggctcgggcggtggtgg
atctggaggaggtgggagctctcaggcttatctacagcagtctggggctgagctggtgaggcctggggcctcagtgaagatgtcct
gcaaggcttctggctacacatttaccagttacaatatgcactgggtaaagcagacacctagacagggcctggaatggattggagct
atttatccaggaaatggtgatacttcctacaatcagaagttcaagggcaaggccacactgactgtagacaaatcctccagcacagcc
tacatgcagctcagcagcctgacatctgaagactctgcggtctatttctgtgcaagagtggtgtactatagtaactcttactggtacttc
gatgtctggggcacagggaccacggtcaccgtctcttctgatcaggagcccaaatcttgtgacaaaactcacacatgcccaccgtg
cccagcacctgaactcctggggggaccgtcagtcttcctcttccccccaaaacccaaggacaccctcatgatctcccggacccctg
aggtcacatgcgtggtggtggacgtgagccacgaagaccctgaggtcaagttcaactggtacgtggacggcgtggaggtgcata
atgccaagacaaagccgcgggaggagcagtacaacagcacgtaccgtgtggtcagcgtcctcaccgtcctgcaccaggactgg
ctgaatggcaaggagtacaagtgcaaggtctccaacaaagccctcccagcccccatcgagaaaacaatctccaaagccaaaggg
cagccccgagaaccacaggtgtacaccctgcccccatcccgggatgagctgaccaagaaccaggtcagcctgacctgcctggtc
aaaggcttctatcccagcgacatcgccgtggagtgggagagcaatgggcagccggagaacaactacaagaccacgcctcccgt
gctggactccgacggctccttcttcctctacagcaagctcaccgtggacaagagcaggtggcagcaggggaacgtcttctcatgct
ccgtgatgcatgaggctctgcacaaccactacacgcagaagagcctctccctgtctccgggtaaatgatctaga
2H7 + Completely WT IgG tail:
2H7 scFv WTH WTCH2CH3 (SEQ ID NO: 459)
Protein sequence
mdfqvqifsfllisasviiargqivlsqspailsaspgekvtmtcrasssvsymhwyqqkpgsspkpwiy
apsnlasgvparfsgsgsgtsysltisrveaedaatyycqqwsfnpptfgagtklelkdgggsggggsggggssqaylqqsgae
lvrpgasvkmsckasgytftsynmhwvkqtprqglewigaiypgngdtsynqkfkgkatltvdkssstaymqlssltsedsa
vyfcarvvyysnsywyfdvwgtgttvtvssdqepkscdkthtcppcpapellggpsvflfppkpkdtlmisrtpevtcvvvd
vshedpevkfnwyvdgvevhnaktkpreeqynstyrvvsvltvlhqdwlngkeykckvsnkalpapiektiskakgqpre
pqvytlppsrdeltknqvsltclvkgfypsdiavewesngqpennykttppvldsdgsfflyskltvdksrwqqgnvfscsvm
healhnhytqkslslspgk
NT
CD80 transmembrane domain and cytoplasmic tail (+restriction sites) (SEQ
ID NO: 460)
gcggatccttcgaacctgctcccatcctgggccattaccttaatctcagtaaatggaatttttgtgatatgctgcc
tgacctactgctttgccccaagatgcagagagagaaggaggaatgagagattgagaagggaaagtgtacgccctgtataaatcgat
AA
CD80 transmembrane domain and cytoplasmic tail (SEQ ID NO: 461)
adpsnllpswaitlisvngifviccltycfaprcrerrrnerlrresvrpv
NT
40.2.220 VL (anti-human CD40 scFv #1--VL) (SEQ ID NO: 462)
aagcttatggattttcaagtgcagattttcagcttcctgctaatcagtgcttcagtcataatgtccagaggagtcg
acattgttctgactcagtctccagccaccctgtctgtgactccaggagatagagtctctctttcctgcagggccagccagagtattagc
gactacttacactggtatcaacaaaaatcacatgagtctccaaggcttctcatcaaatatgcttcccattccatctctgggatcccctcc
aggttcagtggcagtggatcagggtcagatttcactctcagtatcaacagtgtggaacctgaagatgttggaatttattactgtcaaca
tggtcacagctttccgtggacgttcggtggaggcaccaagctggaaatcaaacgg
AA
40.2.220 VL (anti-human CD40 scFv #1--VL) (SEQ ID NO: 463)
mdfqvqifsfllisasvimsrgvdivltqspatlsvtpgdrvslscrasqsisdylhwyqqkshesprlliky
ashsisgipsrfsgsgsgsdftlsinsvepedvgiyycqhghsfpwtfgggtkleikr
NT
40.2.220 VH (for anti-human CD40 scFv #1--VH) (SEQ ID NO: 464)
cagatccagttggtgcaatctggacctgagctgaagaagcctggagagacagtcaggatctcctgcaaggc
ttctgggtatgccttcacaactactggaatgcagtgggtgcaagagatgccaggaaagggtttgaagtggattggctggataaacac
cccactctggagtgccaaaatatgtagaagacttcaaggacggtttgccttctctttggaaacctctgccaacactgcatatttacaga
taagcaacctcaaagatgaggacacggctacgtatttctgtgtgagatccgggaatggtaactatgacctggcctactttgcttactg
gggccaagggacactggtcactgtctctgatca
AA
40.2.220 VH (for anti-human CD40 scFv #1--VH) (SEQ ID NO: 465)
qiqlvqsgpelkkpgetvrisckasgyaftttgmqwvqempgkglkwigwintplwsakicrrlqgrfa
fsletsantaylqisnlkdedtatyfcvrsgngnydlayfaywgqgtlvtvs
NT
40.2.220 scFv (anti-human CD40 scFv #1) (SEQ ID NO: 466)
aagcttatggattttcaagtgcagattttcagcttcctgctaatcagtgcttcagtcataatgtccagaggagtcg
acattgttctgactcagtctccagccaccctgtctgtgactccaggagatagagtctctctttcctgcagggccagccagagtattagc
gactacttacactggtatcaacaaaaatcacatgagtctccaaggcttctcatcaaatatgcttcccattccatctctgggatcccctcc
aggttcagtggcagtggatcagggtcagatttcactctcagtatcaacagtgtggaacctgaagatgttggaatttattactgtcaaca
tggtcacagctttccgtggacgttcggtggaggcaccaagctggaaatcaaacggggtggcggtggctcgggcggaggtgggtc
gggtggcggcggatctcagatccagttggtgcaatctggacctgagctgaagaagcctggagagacagtcaggatctcctgcaa
ggcttctgggtatgccttcacaactactggaatgcagtgggtgcaagagatgccaggaaagggtttgaagtggattggctggataa
acaccccactctggagtgccaaaatatgtagaagacttcaaggacggtttgccttctctttggaaacctctgccaacactgcatattta
cagataagcaacctcaaagatgaggacacggctacgtatttctgtgtgagatccgggaatggtaactatgacctggcctactttgctt
actggggccaagggacactggtcactgtctctgatca
AA
40.2.220 scFv (anti-human CD40 scFv #1) (SEQ ID NO: 467)
mdfqvqifsfllisasvimsrgvdivltqspatlsvtpgdrvslscrasqsisdylhwyqqkshesprlliky
ashsisgipsrfsgsgsgsdftlsinsvepedvgiyycqhghsfpwtfgggtkleikrggggsggggsggggsqiqlvqsgpel
kkpgetvrisckasgyaftttgmqwvqempgkglkwigwintplwsakicrrlqgrfafsletsantaylqisnlkdedtatyfc
vrsgngnydlayfaywgqgtlvtvs
NT
2e12 VL (with L6 VK leader peptide) (SEQ ID NO: 468)
atggattttcaagtgcagattttcagcttcctgctaatcagtgcttcagtcataatgtccagaggagtcgacattg
tgctcacccaatctccagcttctttggctgtgtctctaggtcagagagccaccatctcctgcagagccagtgaaagtgttgaatattat
gtcacaagtttaatgcagtggtaccaacagaaaccaggacagccacccaaactcctcatctctgctgcatccaacgtagaatctgg
ggtccctgccaggtttagtggcagtgggtctgggacagacttcagcctcaacatccatcctgtggaggaggatgatattgcaatgta
tttctgtcagcaaagtaggaaggttccttggacgttcggtggaggcaccaagctggaaatcaaacgg
AA
2e12 VL (with L6 VK leader peptide) (SEQ ID NO: 469)
mdfqvqifsfllisasvimsrgvdivltqspaslavslgqratiscrasesveyyvtslmqwyqqkpgqp
pkllisaasnvesgvparfsgsgsgtdfslnihpveeddiamyfcqqsrkvpwtfgggtkleikr
NT
2e12 VH (no leader peptide) (SEQ ID NO: 470)
caggtgcagctgaaggagtcaggacctggcctggtggcgccctcacagagcctgtccatcacatgcaccg
tctcagggttctcattaaccggctatggtgtaaactgggttcgccagcctccaggaaagggtctggagtggctgggaatgatatggg
gtgatggaagcacagactataattcagctctcaaatccagactgagcatcaccaaggacaactccaagagccaagttttcttaaaaa
tgaacagtctgcaaactgatgacacagccagatactactgtgccagagatggttatagtaactttcattactatgttatggactactgg
ggtcaaggaacctcagtcaccgtctcctca(gatctg)
AA
2e12 VH (SEQ ID NO: 471)
qvqlkesgpglvapsqslsitctvsgfsltgygvnwvrqppgkglewlgmiwgdgstdynsalksrlsit
kdnsksqvflkmnslqtddtaryycardgysnfhyyvmdywgqgtsvtvss
NT
2e12scFv(+Restriction sites) (SEQ ID NO: 472)
aagcttatggattttcaagtgcagattttcagcttcctgctaatcagtgcttcagtcataatgtccagaggagtcg
acattgtgctcacccaatctccagcttctttggctgtgtctctaggtcagagagccaccatctcctgcagagccagtgaaagtgttgaa
tattatgtcacaagtttaatgcagtggtaccaacagaaaccaggacagccacccaaactcctcatctctgctgcatccaacgtagaat
ctggggtccctgccaggtttagtggcagtgggtctgggacagacttcagcctcaacatccatcctgtggaggaggatgatattgcaa
tgtatttctgtcagcaaagtaggaaggttccttggacgttcggtggaggcaccaagctggaaatcaaacggggtggcggtggctcg
ggcggaggtgggtcgggtggcggcggatctcaggtgcagctgaaggagtcaggacctggcctggtggcgccctcacagagcc
tgtccatcacatgcaccgtctcagggttctcattaaccggctatggtgtaaactgggttcgccagcctccaggaaagggtctggagt
ggctgggaatgatatggggtgatggaagcacagactataattcagctctcaaatccagactgagcatcaccaaggacaactccaa
gagccaagttttcttaaaaatgaacagtctgcaaactgatgacacagccagatactactgtgccagagatggttatagtaactttcatt
actatgttatggactactggggtcaaggaacctcagtcaccgtctcctct(gatcag)
AA
2e12scFv (SEQ ID NO: 473)
mdfqvqifsfllisasvimsrgvdivltqspaslavslgqratiscrasesveyyvtslmqwyqqkpgqp
pkllisaasnvesgvparfsgsgsgtdfslnihpveeddiamyfcqqsrkvpwtfgggtkleikrggggsggggsggggsqvq
lkesgpglvapsqslsitctvsgfsltgygvnwvrqppgkglewlgmiwgdgstdynsalksrlsitkdnsksqvflkmnslqt
ddtaryycardgysnfhyyvmdywgqgtsvtvss
10A8 is anti-CD152 (CTLA-4)
10A8 VL (with L6 VK leader peptide) (SEQ ID NO: 474)
atggattttcaagtgcagattttcagcttcctgctaatcagtgcttcagtcataatgtccagaggagtcgacatcc
agatgacacagtctccatcctcactgtctgcatctctgggaggcaaagtcaccatcacttgcaaggcaagccaagacattaagaagt
atataggttggtaccaacacaagcctggaaaaggtcccaggctgctcatatattacacatctacattacagccaggcatcccatcaa
ggttcagtggaagtgggtctgggagagattattccctcagcatcagaaacctggagcctgaagatattgcaacttattattgtcaaca
gtatgataatcttccattgacgttcggctcggggacaaagttggaaataaaacgg
AA
10A8 VL (SEQ ID NO: 475)
mdfqvqifsfllisasvimsrgvdiqmtqspsslsaslggkvtitckasqdikkyigwyqhkpgkgprlli
yytstlqpgipsrfsgsgsgrdyslsirnlepediatyycqqydnlpltfgsgtkleikr
NT
10A8 VH (no leader peptide) (SEQ ID NO: 476)
gatgtacagcttcaggagtcaggacctggcctcgtgaaaccttctcagtctctgtctctcacctgctctgtcact
ggctactccatcaccagtggtttctactggaactggatccgacagtttccgggaaacaaactggaatggatgggccacataagcca
cgacggtaggaataactacaacccatctctcataaatcgaatctccatcactcgtgacacatctaagaaccagtttttcctgaagttga
gttctgtgactactgaggacacagctacatatttctgtgcaagacactacggtagtagcggagctatggactactggggtcaaggaa
cctcagtcaccgtctcctctgatca
AA
10A8 VH (SEQ ID NO: 477)
dvqlqesgpglvkpsqslsltcsvtgysitsgfywnwirqfpgnklewmghishdgrnnynpslinrisi
trdtsknqfflklssvttedtatyfcarhygssgamdywgqgtsvtvss
NT
10A8 scFv (SEQ ID NO: 478)
aagcttatggattttcaagtgcagattttcagcttcctgctaatcagtgcttcagtcataatgtccagaggagtcg
acatccagatgacacagtctccatcctcactgtctgcatctctgggaggcaaagtcaccatcacttgcaaggcaagccaagacatta
agaagtatataggttggtaccaacacaagcctggaaaaggtcccaggctgctcatatattacacatctacattacagccaggcatcc
catcaaggttcagtggaagtgggtctgggagagattattccctcagcatcagaaacctggagcctgaagatattgcaacttattattgt
caacagtatgataatcttccattgacgttcggctcggggacaaagttggaaataaaacggggtggcggtggctcgggcggtggtg
ggtcgggtggcggcggatctgatgtacagcttcaggagtcaggacctggcctcgtgaaaccttctcagtctctgtctctcacctgctc
tgtcactggctactccatcaccagtggtttctactggaactggatccgacagtttccgggaaacaaactggaatggatgggccacat
aagccacgacggtaggaataactacaacccatctctcataaatcgaatctccatcactcgtgacacatctaagaaccagtttttcctga
agttgagttctgtgactactgaggacacagctacatatttctgtgcaagacactacggtagtagcggagctatggactactggggtca
aggaacctcagtcaccgtctcctctgatca
AA
10A8 scFv (SEQ ID NO: 479)
mdfqvqifsfllisasvimsrgvdiqmtqspsslsaslggkvtitckasqdikkyigwyqhkpgkgprlli
yytstlqpgipsrfsgsgsgrdyslsirnlepediatyycqqydnlpltfgsgtkleikrggggsggggsggggsdvqlqesgpgl
vkpsqslsltcsvtgysitsgfywnwirqfpgnklewmghishdgrnnynpslinrisitrdtsknqfflklssvttedtatyfcar
hygssgamdywgqgtsvtvssd
NT
40.2.220-hmtIgG1-hCD80 (SEQ ID NO: 480)
aagcttatggattttcaagtgcagattttcagcttcctgctaatcagtgcttcagtcataatgtccagaggagtcg
acattgttctgactcagtctccagccaccctgtctgtgactccaggagatagagtctctctttcctgcagggccagccagagtattagc
gactacttacactggtatcaacaaaaatcacatgagtctccaaggcttctcatcaaatatgcttcccattccatctctgggatcccctcc
aggttcagtggcagtggatcagggtcagatttcactctcagtatcaacagtgtggaacctgaagatgttggaatttattactgtcaaca
tggtcacagctttccgtggacgttcggtggaggcaccaagctggaaatcaaacggggtggcggtggctcgggcggaggtgggtc
gggtggcggcggatctcagatccagttggtgcaatctggacctgagctgaagaagcctggagagacagtcaggatctcctgcaa
ggcttctgggtatgccttcacaactactggaatgcagtgggtgcaagagatgccaggaaagggtttgaagtggattggctggataa
acaccccactctggagtgccaaaatatgtagaagacttcaaggacggtttgccttctctttggaaacctctgccaacactgcatattta
cagataagcaacctcaaagatgaggacacggctacgtatttctgtgtgagatccgggaatggtaactatgacctggcctactttgctt
actggggccaagggacactggtcactgtctctgatctggagcccaaatcttctgacaaaactcacacatccccaccgtccccagca
cctgaactcctggggggatcgtcagtcttcctcttccccccaaaacccaaggacaccctcatgatctcccggacccctgaggtcac
atgcgtggtggtggacgtgagccacgaagaccctgaggtcaagttcaactggtacgtggacggcgtggaggtgcataatgccaa
gacaaagccgcgggaggagcagtacaacagcacgtaccgtgtggtcagcgtcctcaccgtcctgcaccaggactggctgaatg
gcaaggagtacaagtgcaaggtctccaacaaagccctcccagcccccatcgagaaaaccatctccaaagccaaagggcagccc
cgagaaccacaggtgtacaccctgcccccatcccgggatgagctgaccaagaaccaggtcagcctgacctgcctggtcaaaggc
ttctatcccagcgacatcgccgtggagtgggagagcaatgggcagccggagaacaactacaagaccacgcctcccgtgctggac
tccgacggctccttcttcctctacagcaagctcaccgtggacaagagcaggtggcagcaggggaacgtcttctcatgctccgtgat
gcatgaggctctgcacaaccactacacgcagaagagcctctccctgtctccgggtaaagcggatccttcgaacctgctcccatcct
gggccattaccttaatctcagtaaatggaatttttgtgatatgctgcctgacctactgctttgccccaagatgcagagagagaaggag
gaatgagagattgagaagggaaagtgtacgccctgtataaatcgat
AA
40.2.220-hmtIgG1-hCD80 (SEQ ID NO: 481)
mdfqvqifsfllisasvimsrgvdivltqspatlsvtpgdrvslscrasqsisdylhwyqqkshesprlliky
ashsisgipsrfsgsgsgsdftlsinsvepedvgiyycqhghsfpwtfgggtkleikrggggsggggsggggsqiqlvqsgpel
kkpgetvrisckasgyaftttgmqwvqempgkglkwigwintplwsakicrrlqgrfafsletsantaylqisnlkdedtatyfc
vrsgngnydlayfaywgqgtlvtvsdlepkssdkthtsppspapellggssvflfppkpkdtlmisrtpevtcvvvdvshedpe
vkfnwyvdgvevhnaktkpreeqynstyrvvsvltvlhqdwlngkeykckvsnkalpapiektiskakgqprepqvytlpp
srdeltknqvsltclvkgfypsdiavewesngqpennykttppvldsdgsfflyskltvdksrwqqgnvfscsvmhealhnhy
tqkslslspgkadpsnllpswaitlisvngifviccltycfaprcrerrrnerlrresvrpv
NT
2e12scFv-hmtIgG1-CD80 fusion protein (SEQ ID NO: 482)
aagcttatggattttcaagtgcagattttcagcttcctgctaatcagtgcttcagtcataatgtccagaggagtcg
acattgtgctcacccaatctccagcttctttggctgtgtctctaggtcagagagccaccatctcctgcagagccagtgaaagtgttgaa
tattatgtcacaagtttaatgcagtggtaccaacagaaaccaggacagccacccaaactcctcatctctgctgcatccaacgtagaat
ctggggtccctgccaggtttagtggcagtgggtctgggacagacttcagcctcaacatccatcctgtggaggaggatgatattgcaa
tgtatttctgtcagcaaagtaggaaggttccttggacgttcggtggaggcaccaagctggaaatcaaacggggtggcggtggctcg
ggcggaggtgggtcgggtggcggcggatctcaggtgcagctgaaggagtcaggacctggcctggtggcgccctcacagagcc
tgtccatcacatgcaccgtctcagggttctcattaaccggctatggtgtaaactgggttcgccagcctccaggaaagggtctggagt
ggctgggaatgatatggggtgatggaagcacagactataattcagctctcaaatccagactgagcatcaccaaggacaactccaa
gagccaagttttcttaaaaatgaacagtctgcaaactgatgacacagccagatactactgtgccagagatggttatagtaactttcatt
actatgttatggactactggggtcaaggaacctcagtcaccgtctcctcagatctggagcccaaatcttctgacaaaactcacacatc
cccaccgtccccagcacctgaactcctggggggatcgtcagtcttcctcttccccccaaaacccaaggacaccctcatgatctccc
ggacccctgaggtcacatgcgtggtggtggacgtgagccacgaagaccctgaggtcaagttcaactggtacgtggacggcgtgg
aggtgcataatgccaagacaaagccgcgggaggagcagtacaacagcacgtaccgtgtggtcagcgtcctcaccgtcctgcacc
aggactggctgaatggcaaggagtacaagtgcaaggtctccaacaaagccctcccagcccccatcgagaaaaccatctccaaag
ccaaagggcagccccgagaaccacaggtgtacaccctgcccccatcccgggatgagctgaccaagaaccaggtcagcctgacc
tgcctggtcaaaggcttctatcccagcgacatcgccgtggagtgggagagcaatgggcagccggagaacaactacaagaccac
gcctcccgtgctggactccgacggctccttcttcctctacagcaagctcaccgtggacaagagcaggtggcagcaggggaacgtc
ttctcatgctccgtgatgcatgaggctctgcacaaccactacacgcagaagagcctctccctgtctccgggtaaagcggatccttcg
aacctgctcccatcctgggccattaccttaatctcagtaaatggaatttttgtgatatgctgcctgacctactgctttgccccaagatgca
gagagagaaggaggaatgagagattgagaagggaaagtgtacgccctgtataaatcgat
AA
2e12scFv-hmtIgG1-CD80 fusion protein (SEQ ID NO: 483)
mdfqvqifsfllisasvimsrgvdivltqspaslavslgqratiscrasesveyyvtslmqwyqqkpgqp
pkllisaasnvesgvparfsgsgsgtdfslnihpveeddiamyfcqqsrkvpwtfgggtkleikrggggsggggsggggsqvq
lkesgpglvapsqslsitctvsgfsltgygvnwvrqppgkglewlgmiwgdgstdynsalksrlsitkdnsksqvflkmnslqt
ddtaryycardgysnfhyyvmdywgqgtsvtvssdlepkssdkthtsppspapellggssvflfppkpkdtlmisrtpevtcv
vvdvshedpevkfnwyvdgvevhnaktkpreeqynstyrvvsvltvlhqdwlngkeykckvsnkalpapiektiskakgq
prepqvytlppsrdeltknqvsltclvkgfypsdiavewesngqpennykttppvldsdgsfflyskltvdksrwqqgnvfscs
vmhealhnhytqkslslspgkadpsnllpswaitlisvngifviccltycfaprcrerrrnerlrresvrpv
NT
10A8 scFv-hmtIgG1-CD80 (SEQ ID NO: 484)
aagcttatggattttcaagtgcagattttcagcttcctgctaatcagtgcttcagtcataatgtccagaggagtcg
acatccagatgacacagtctccatcctcactgtctgcatctctgggaggcaaagtcaccatcacttgcaaggcaagccaagacatta
agaagtatataggttggtaccaacacaagcctggaaaaggtcccaggctgctcatatattacacatctacattacagccaggcatcc
catcaaggttcagtggaagtgggtctgggagagattattccctcagcatcagaaacctggagcctgaagatattgcaacttattattgt
caacagtatgataatcttccattgacgttcggctcggggacaaagttggaaataaaacggggtggcggtggctcgggcggtggtg
ggtcgggtggcggcggatctgatgtacagcttcaggagtcaggacctggcctcgtgaaaccttctcagtctctgtctctcacctgctc
tgtcactggctactccatcaccagtggtttctactggaactggatccgacagtttccgggaaacaaactggaatggatgggccacat
aagccacgacggtaggaataactacaacccatctctcataaatcgaatctccatcactcgtgacacatctaagaaccagtttttcctga
agttgagttctgtgactactgaggacacagctacatatttctgtgcaagacactacggtagtagcggagctatggactactggggtca
aggaacctcagtcaccgtctcctctgatctggagcccaaatcttctgacaaaactcacacatccccaccgtccccagcacctgaact
cctggggggatcgtcagtcttcctcttccccccaaaacccaaggacaccctcatgatctcccggacccctgaggtcacatgcgtgg
tggtggacgtgagccacgaagaccctgaggtcaagttcaactggtacgtggacggcgtggaggtgcataatgccaagacaaagc
cgcgggaggagcagtacaacagcacgtaccgtgtggtcagcgtcctcaccgtcctgcaccaggactggctgaatggcaaggagt
acaagtgcaaggtctccaacaaagccctcccagcccccatcgagaaaaccatctccaaagccaaagggcagccccgagaacca
caggtgtacaccctgcccccatcccgggatgagctgaccaagaaccaggtcagcctgacctgcctggtcaaaggcttctatccca
gcgacatcgccgtggagtgggagagcaatgggcagccggagaacaactacaagaccacgcctcccgtgctggactccgacgg
ctccttcttcctctacagcaagctcaccgtggacaagagcaggtggcagcaggggaacgtcttctcatgctccgtgatgcatgagg
ctctgcacaaccactacacgcagaagagcctctccctgtctccgggtaaagcggatccttcgaacctgctcccatcctgggccatta
ccttaatctcagtaaatggaatttttgtgatatgctgcctgacctactgctttgccccaagatgcagagagagaaggaggaatgagag
attgagaagggaaagtgtacgccctgtataaatcgat
AA
10A8 scFv-hmtIgG1-CD80 (SEQ ID NO: 485)
mdfqvqifsfllisasvimsrgvdiqmtqspsslsaslggkvtitckasqdikkyigwyqhkpgkgprlli
yytstlqpgipsrfsgsgsgrdyslsirnlepediatyycqqydnlpltfgsgtkleikrggggsggggsggggsdvqlqesgpgl
vkpsqslsltcsvtgysitsgfywnwirqfpgnklewmghishdgrnnynpslinrisitrdtsknqfflklssvttedtatyfcar
hygssgamdywgqgtsvtvssdlepkssdkthtsppspapellggssvflfppkpkdtlmisrtpevtcvvvdvshedpevk
fnwyvdgvevhnaktkpreeqynstyrvvsvltvlhqdwlngkeykckvsnkalpapiektiskakgqprepqvytlppsr
deltknqvsltclvkgfypsdiavewesngqpennykttppvldsdgsfflyskltvdksrwqqgnvfscsvmhealhnhyt
qkslslspgkadpsnllpswaitlisvngifviccltycfaprcrerrrnerlrresvrpv
NT
500A2-hmtIgG1-CD80 (SEQ ID NO: 486)
atgttgtatacatctcagctccttgggcttttactcttctggatttcagcctccagaagtgacatagtgctgactca
gactccagccactctgtctctaattcctggagaaagagtcacaatgacctgtaagaccagtcagaatattggcacaatcttacactgg
tatcaccaaaaaccaaaggaggctccaagggctctcatcaagtatgcttcgcagtccattcctgggatcccctccagattcagtggc
agtggttcggaaacagatttcactctcagcatcaataacctggagcctgatgatatcggaatttattactgtcaacaaagtagaagctg
gcctgtcacgttcggtcctggcaccaagctggagataaaacggggtggcggtggctcgggcggaggtgggtcgggtggcggcg
gatctcaggtcaagctgcagcagtccggttctgaactagggaaacctggggcctcagtgaaactgtcctgcaagacttcaggctac
atattcacagatcactatatttcttgggtgaaacagaagcctggagaaagcctgcagtggataggaaatgtttatggtggaaatggtg
gtacaagctacaatcaaaaattccagggcaaggccacactgactgtagataaaatctctagcacagcctacatggaactcagcagc
ctgacatctgaggattctgccatctattactgtgcaagaaggccggtagcgacgggccatgctatggactactggggtcaggggat
ccaagttaccgtctcctctgatctggagcccaaatcttctgacaaaactcacacatccccaccgtccccagcacctgaactcctggg
gggatcgtcagtcttcctcttccccccaaaacccaaggacaccctcatgatctcccggacccctgaggtcacatgcgtggtggtgg
acgtgagccacgaagaccctgaggtcaagttcaactggtacgtggacggcgtggaggtgcataatgccaagacaaagccgcgg
gaggagcagtacaacagcacgtaccgtgtggtcagcgtcctcaccgtcctgcaccaggactggctgaatggcaaggagtacaag
tgcaaggtctccaacaaagccctcccagcccccatcgagaaaaccatctccaaagccaaagggcagccccgagaaccacaggt
gtacaccctgcccccatcccgggatgagctgaccaagaaccaggtcagcctgacctgcctggtcaaaggcttctatcccagcgac
atcgccgtggagtgggagagcaatgggcagccggagaacaactacaagaccacgcctcccgtgctggactccgacggctcctt
cttcctctacagcaagctcaccgtggacaagagcaggtggcagcaggggaacgtcttctcatgctccgtgatgcatgaggctctgc
acaaccactacacgcagaagagcctctccctgtctccgggtaaagcggatccttcgaacctgctcccatcctgggccattaccttaa
tctcagtaaatggaatttttgtgatatgctgcctgacctactgctttgccccaagatgcagagagagaaggaggaatgagagattgag
aagggaaagtgtacgccctgtataaatcgat
AA
500A2-hmtIgG1-CD80 (SEQ ID NO: 487)
mlytsqllglllfwisasrsdivltqtpatlslipgervtmtcktsqnigtilhwyhqkpkeapralikyasqsi
pgipsrfsgsgsetdftlsinnlepddigiyycqqsrswpvtfgpgtkleikrggggsggggsggggsqvklqqsgselgkpga
svklscktsgyiftdhyiswvkqkpgeslqwignvyggnggtsynqkfqgkatltvdkisstaymelssltsedsaiyycarrp
vatghamdywgqgiqvtvssdlepkssdkthtsppspapellggssvflfppkpkdtlmisrtpevtcvvvdvshedpevkf
nwyvdgvevhnaktkpreeqynstyrvvsvltvlhqdwlngkeykckvsnkalpapiektiskakgqprepqvytlppsrd
eltknqvsltclvkgfypsdiavewesngqpennykttppvldsdgsfflyskltvdksrwqqgnvfscsvmhealhnhytq
kslslspgkadpsnllpswaitlisvngifviccltycfaprcrerrrnerlrresvrpv
NT
2H7 scFv MTH(SSS)WTCH2CH3 (SEQ ID NO: 488)
aagcttgccgccatggattttcaagtgcagattttcagcttcctgctaatcagtgcttcagtcataattgccagag
gacaaattgttctctcccagtctccagcaatcctgtctgcatctccaggggagaaggtcacaatgacttgcagggccagctcaagtg
taagttacatgcactggtaccagcagaagccaggatcctcccccaaaccctggatttatgccccatccaacctggcttctggagtcc
ctgctcgcttcagtggcagtgggtctgggacctcttactctctcacaatcagcagagtggaggctgaagatgctgccacttattactg
ccagcagtggagttttaacccacccacgttcggtgctgggaccaagctggagctgaaagatggcggtggctcgggcggtggtgg
atctggaggaggtgggagctctcaggcttatctacagcagtctggggctgagctggtgaggcctggggcctcagtgaagatgtcct
gcaaggcttctggctacacatttaccagttacaatatgcactgggtaaagcagacacctagacagggcctggaatggattggagct
atttatccaggaaatggtgatacttcctacaatcagaagttcaagggcaaggccacactgactgtagacaaatcctccagcacagcc
tacatgcagctcagcagcctgacatctgaagactctgcggtctatttctgtgcaagagtggtgtactatagtaactcttactggtacttc
gatgtctggggcacagggaccacggtcaccgtctcttctgatcaggagcccaaatcttctgacaaaactcacacatccccaccgtc
cccagcacctgaactcctggggggaccgtcagtcttcctcttccccccaaaacccaaggacaccctcatgatctcccggacccctg
aggtcacatgcgtggtggtggacgtgagccacgaagaccctgaggtcaagttcaactggtacgtggacggcgtggaggtgcata
atgccaagacaaagccgcgggaggagcagtacaacagcacgtaccgtgtggtcagcgtcctcaccgtcctgcaccaggactgg
ctgaatggcaaggagtacaagtgcaaggtctccaacaaagccctcccagcccccatcgagaaaacaatctccaaagccaaaggg
cagccccgagaaccacaggtgtacaccctgcccccatcccgggatgagctgaccaagaaccaggtcagcctgacctgcctggtc
aaaggcttctatcccagcgacatcgccgtggagtgggagagcaatgggcagccggagaacaactacaagaccacgcctcccgt
gctggactccgacggctccttcttcctctacagcaagctcaccgtggacaagagcaggtggcagcaggggaacgtcttctcatgct
ccgtgatgcatgaggctctgcacaaccactacacgcagaagagcctctccctgtctccgggtaaatgatctaga
2H7 scFv MTH(SSS)WTCH2CH3 protein sequence (SEQ ID NO: 489):
mdfqvqifsfllisasviiargqivlsqspailsaspgekvtmtcrasssvsymhwyqqkpgsspkpwiy
apsnlasgvparfsgsgsgtsysltisrveaedaatyycqqwsfnpptfgagtklelkdgggsggggsggggssqaylqqsgae
lvrpgasvkmsckasgytftsynmhwvkqtprqglewigaiypgngdtsynqkfkgkatltvdkssstaymqlssltsedsa
vyfcarvvyysnsywyfdvwgtgttvtvssdqepkssdkthtsppspapellggpsvflfppkpkdtlmisrtpevtcvvvdv
shedpevkfnwyvdgvevhnaktkpreeqynstyrvvsvltvlhqdwlngkeykckvsnkalpapiektiskakgqprep
qvytlppsrdeltknqvsltclvkgfypsdiavewesngqpennykttppvldsdgsfflyskltvdksrwqqgnvfscsvmh
ealhnhytqkslslspgk
HuIgGMHncs1 (oligo for CSS) (SEQ ID NO: 490)
gtt gtt gat cag gag ccc aaa tct tgt gac aaa act cac
HuIgGMHncs2 (oligo for SCS = ncs2) (SEQ ID NO: 491)
gtt gtt gat cag gag ccc aaa tct tct gac aaa act cac aca tgc cca ccg
HuIgGMHncs3 (oligo for SSC = ncs3) (SEQ ID NO: 492)
gtt gtt gat cag gag ccc aaa tct tct gac aaa act cac aca tct cca ccg tgc cca gca
cct g
hIgGWT3xba (3′ oligo for above mutation introduction) (SEQ ID NO:
493)
gtt gtt tct aga tca ttt acc cgg aga cag gga gag gct ctt ctg cgt gta g
Vhser11: (oligo for Leu to Ser at VH11) (SEQ ID NO: 494)
gga ggt ggg agc tct cag gct tat cta cag cag tct ggg gct gag tcg gtg agg cc
huIgG1-3′ (3′ oligo to amplify IgG1 C regions, 3′ end of CH3) (SEQ ID
NO: 495)
gtc tct aga cta tca ttt acc cgg aga cag
huIgA/Gchim5 (oligo for pcr#1) (SEQ ID NO: 496)
cca tct ccc tca act cca cct acc cca tct ccc tca tgc gca cct gaa ctc ctg
huIgAhg-5′ (oligo for pcr#2) (SEQ ID NO: 497)
gtt gtt gat cag cca gtt ccc tca act cca cct acc cca tct ccc caa ct
huIgA3′ (SEQ ID NO: 498)
gtt gtt tct aga tta tca gta gca ggt gcc gtc cac ctc cgc cat gac aac
2H7 scFv IgAH IGG WT CH2CH3, 2H7 scFv with IgA hinge and WT
CH2 and CH3 (SEQ ID NO: 499)
aagcttgccgccatggattttcaagtgcagattttcagcttcctgctaatcagtgcttcagtcataattgccagag
gacaaattgttctctcccagtctccagcaatcctgtctgcatctccaggggagaaggtcacaatgacttgcagggccagctcaagtg
taagttacatgcactggtaccagcagaagccaggatcctcccccaaaccctggatttatgccccatccaacctggcttctggagtcc
ctgctcgcttcagtggcagtgggtctgggacctcttactctctcacaatcagcagagtggaggctgaagatgctgccacttattactg
ccagcagtggagttttaacccacccacgttcggtgctgggaccaagctggagctgaaagatggcggtggctcgggcggtggtgg
atctggaggaggtgggagctctcaggcttatctacagcagtctggggctgagctggtgaggcctggggcctcagtgaagatgtcct
gcaaggcttctggctacacatttaccagttacaatatgcactgggtaaagcagacacctagacagggcctggaatggattggagct
atttatccaggaaatggtgatacttcctacaatcagaagttcaagggcaaggccacactgactgtagacaaatcctccagcacagcc
tacatgcagctcagcagcctgacatctgaagactctgcggtctatttctgtgcaagagtggtgtactatagtaactcttactggtacttc
gatgtctggggcacagggaccacggtcaccgtctctgatcagccagttccctcaactccacctaccccatctccctcaactccacct
accccatctccctcatgcgcacctgaactcctggggggaccgtcagtcttcctcttccccccaaaacccaaggacaccctcatgatc
tcccggacccctgaggtcacatgcgtggtggtggacgtgagccacgaagaccctgaggtcaagttcaactggtacgtggacggc
gtggaggtgcataatgccaagacaaagccgcgggaggagcagtacaacagcacgtaccgtgtggtcagcgtcctcaccgtcctg
caccaggactggctgaatggcaaggagtacaagtgcaaggtctccaacaaagccctcccagcccccatcgagaaaacaatctcc
aaagccaaagggcagccccgagaaccacaggtgtacaccctgcccccatcccgggatgagctgaccaagaaccaggtcagcct
gacctgcctggtcaaaggcttctatcccagcgacatcgccgtggagtgggagagcaatgggcagccggagaacaactacaaga
ccacgcctcccgtgctggactccgacggctccttcttcctctacagcaagctcaccgtggacaagagcaggtggcagcagggga
acgtcttctcatgctccgtgatgcatgaggctctgcacaaccactacacgcagaagagcctctccctgtctccgggtaaatgatctaga
2H7 scFv IgAH IGG WT CH2CH3 protein sequence (SEQ ID NO: 500)
mdfqvqifsfllisasviiargqivlsqspailsaspgekvtmtcrasssvsymhwyqqkpgsspkpwiy
apsnlasgvparfsgsgsgtsysltisrveaedaatyycqqwsfnpptfgagtklelkdgggsggggsggggssqaylqqsgae
lvrpgasvkmsckasgytftsynmhwvkqtprqglewigaiypgngdtsynqkfkgkatltvdkssstaymqlssltsedsa
vyfcarvvyysnsywyfdvwgtgttvtvsdqpvpstpptpspstpptpspscapellggpsvflfppkpkdtlmisrtpevtcv
vvdvshedpevkfnwyvdgvevhnaktkpreeqynstyrvvsvltvlhqdwlngkeykckvsnkalpapiektiskakgq
prepqvytlppsrdeltknqvsltclvkgfypsdiavewesngqpennykttppvldsdgsfflyskltvdksrwqqgnvfscs
vmhealhnhytqkslslspgk
NT
2H7 scFv IgAH IgACH2CH3 (2H7 scFv IgAhinge and IgA CH2 and
CH3) (SEQ ID NO: 501)
aagcttgccgccatggattttcaagtgcagattttcagcttcctgctaatcagtgcttcagtcataattgccagag
gacaaattgttctctcccagtctccagcaatcctgtctgcatctccaggggagaaggtcacaatgacttgcagggccagctcaagtg
taagttacatgcactggtaccagcagaagccaggatcctcccccaaaccctggatttatgccccatccaacctggcttctggagtcc
ctgctcgcttcagtggcagtgggtctgggacctcttactctctcacaatcagcagagtggaggctgaagatgctgccacttattactg
ccagcagtggagttttaacccacccacgttcggtgctgggaccaagctggagctgaaagatggcggtggctcgggcggtggtgg
atctggaggaggtgggagctctcaggcttatctacagcagtctggggctgagctggtgaggcctggggcctcagtgaagatgtcct
gcaaggcttctggctacacatttaccagttacaatatgcactgggtaaagcagacacctagacagggcctggaatggattggagct
atttatccaggaaatggtgatacttcctacaatcagaagttcaagggcaaggccacactgactgtagacaaatcctccagcacagcc
tacatgcagctcagcagcctgacatctgaagactctgcggtctatttctgtgcaagagtggtgtactatagtaactcttactggtacttc
gatgtctggggcacagggaccacggtcaccgtctcttctgatcagccagttccctcaactccacctaccccatctccctcaactcca
cctaccccatctccctcatgctgccacccccgactgtcactgcaccgaccggccctcgaggacctgctcttaggttcagaagcgat
cctcacgtgcacactgaccggcctgagagatgcctcaggtgtcaccttcacctggacgccctcaagtgggaagagcgctgttcaa
ggaccacctgaccgtgacctctgtggctgctacagcgtgtccagtgtcctgccgggctgtgccgagccatggaaccatgggaaga
ccttcacttgcactgctgcctaccccgagtccaagaccccgctaaccgccaccctctcaaaatccggaaacacattccggcccgag
gtccacctgctgccgccgccgtcggaggagctggccctgaacgagctggtgacgctgacgtgcctggcacgtggcttcagcccc
aaggatgtgctggttcgctggctgcaggggtcacaggagctgccccgcgagaagtacctgacttgggcatcccggcaggagccc
agccagggcaccaccaccttcgctgtgaccagcatactgcgcgtggcagccgaggactggaagaagggggacaccttctcctg
catggtgggccacgaggccctgccgctggccttcacacagaagaccatcgaccgcttggcgggtaaacccacccatgtcaatgt
gtctgttgtcatggcggaggtggacggcacctgctactgataatctaga
AA
2H7 scFv IgAH IgACH2CH3 (2H7 scFv IgA hinge and IgA CH2 and
CH3) (SEQ ID NO: 502)
mdfqvqifsfllisasviiargqivlsqspailsaspgekvtmtcrasssvsymhwyqqkpgsspkpwiy
apsnlasgvparfsgsgsgtsysltisrveaedaatyycqqwsfnpptfgagtklelkdgggsggggsggggssqaylqqsgae
lvrpgasvkmsckasgytftsynmhwvkqtprqglewigaiypgngdtsynqkfkgkatltvdkssstaymqlssltsedsa
vyfcarvvyysnsywyfdvwgtgttvtvssdqpvpstpptpspstpptpspscchprlslhrpaledlllgseailtctltglrdas
gvtftwtpssgksavqgppdrdlcgcysvssvlpgcaepwnhgktftctaaypesktpltatlsksgntfrpevhllpppseelal
nelvtltclargfspkdvlvrwlqgsqelprekyltwasrqepsqgtttfavtsilrvaaedwkkgdtfscmvghealplaftqkti
drlagkpthvnvsvvmaevdgtcy
IgA hinge-CH2—CH3 (Human IgA tail, full length) (SEQ ID NO: 503)
tgatcagccagttccctcaactccacctaccccatctccctcaactccacctaccccatctccctcatgctgcc
acccccgactgtcactgcaccgaccggccctcgaggacctgctcttaggttcagaagcgatcctcacgtgcacactgaccggcct
gagagatgcctcaggtgtcaccttcacctggacgccctcaagtgggaagagcgctgttcaaggaccacctgaccgtgacctctgt
ggctgctacagcgtgtccagtgtcctgccgggctgtgccgagccatggaaccatgggaagaccttcacttgcactgctgcctaccc
cgagtccaagaccccgctaaccgccaccctctcaaaatccggaaacacattccggcccgaggtccacctgctgccgccgccgtc
ggaggagctggccctgaacgagctggtgacgctgacgtgcctggcacgtggcttcagccccaaggatgtgctggttcgctggct
gcaggggtcacaggagctgccccgcgagaagtacctgacttgggcatcccggcaggagcccagccagggcaccaccaccttc
gctgtgaccagcatactgcgcgtggcagccgaggactggaagaagggggacaccttctcctgcatggtgggccacgaggccct
gccgctggccttcacacagaagaccatcgaccgcttggcgggtaaacccacccatgtcaatgtgtctgttgtcatggcggaggtgg
acggcacctgctactgataatctaga
IgA hinge-CH2—CH3 Protein sequence, (Human IgA tail, full length)
(SEQ ID NO: 504)
Dqpvpstpptpspstpptpspscchprlslhrpaledlllgseailtctltglrdasgvtftwtpssgksavqg
ppdrdlcgcysvssvlpgcaepwnhgktftctaaypesktpltatlsksgntfrpevhllpppseelalnelvtltclargfspkdvl
vrwlqgsqelprekyltwasrqepsqgtttfavtsilrvaaedwkkgdtfscmvghealplaftqktidrlagkpthvnvsvvm
aevdgtcy
Human J Chain: (SEQ ID NO: 505)
agatctcaagaagatgaaaggattgttcttgttgacaacaaatgtaagtgtgcccggattacttccaggatcat
ccgttcttccgaagatcctaatgaggacattgtggagagaaacatccgaattattgttcctctgaacaacagggagaatatctctgatc
ccacctcaccattgagaaccagatttgtgtaccatttgtctgacctcagctgtaaaaaatgtgatcctacagaagtggagctggataat
cagatagttactgctacccagagcaatatctgtgatgaagacagtgctacagagacctgctacacttatgacagaaacaagtgctac
acagctgtggtcccactcgtatatggtggtgagaccaaaatggtggaaacagccttaaccccagatgcctgctatcctgactaatcta
ga
Human J Chain polypeptide (SEQ ID NO: 506)
rsqederivlvdnkckcaritsriirssedpnediverniriivplnnrenisdptsplrtrfvyhlsdlsckkc
dpteveldnqivtatqsnicdedsatetcytydrnkcytavvplvyggetkmvetaltpdacyp
HUJCH5nl (J chain 5′ primer) (SEQ ID NO: 507)
gtt gtt aga tct caa gaa gat gaa agg att gtt ctt
HUJCH3 (J chain 3′ primer-antisense) (SEQ ID NO: 508)
gtt gtt tct aga tta gtc agg ata gca ggc atc tgg
4 carboxy terminal amino acids deleted from IgA CH3 (SEQ ID NO: 509)
GTCY
IgAH IgAT4 Human IgA tail, truncated (3T1)-(missing last 4 amino acids
from carboxy terminus) (SEQ ID NO: 510)
tgatcagccagttccctcaactccacctaccccatctccctcaactccacctaccccatctccctcatgctgcc
acccccgactgtcactgcaccgaccggccctcgaggacctgctcttaggttcagaagcgatcctcacgtgcacactgaccggcct
gagagatgcctcaggtgtcaccttcacctggacgccctcaagtgggaagagcgctgttcaaggaccacctgaccgtgacctctgt
ggctgctacagcgtgtccagtgtcctgccgggctgtgccgagccatggaaccatgggaagaccttcacttgcactgctgcctaccc
cgagtccaagaccccgctaaccgccaccctctcaaaatccggaaacacattccggcccgaggtccacctgctgccgccgccgtc
ggaggagctggccctgaacgagctggtgacgctgacgtgcctggcacgtggcttcagccccaaggatgtgctggttcgctggct
gcaggggtcacaggagctgccccgcgagaagtacctgacttgggcatcccggcaggagcccagccagggcaccaccaccttc
gctgtgaccagcatactgcgcgtggcagccgaggactggaagaagggggacaccttctcctgcatggtgggccacgaggccct
gccgctggccttcacacagaagaccatcgaccgcttggcgggtaaacccacccatgtcaatgtgtctgttgtcatggcggaggtgg
actgataatctaga
IgAH IgAT4 Protein sequence: (SEQ ID NO: 511)
Dqpvpstpptpspstpptpspscchprlslhrpaledlllgseailtctltglrdasgvtftwtpssgksavqg
ppdrdlcgcysvssvlpgcaepwnhgktftctaaypesktpltatlsksgntfrpevhllpppseelalnelvtltclargfspkdvl
vrwlqgsqelprekyltwasrqepsqgtttfavtsilrvaaedwkkgdtfscmvghealplaftqktidrlagkpthvnvsvvm
aevd
HUIGA3T1 (Oligo 3′: to delete 4 amino acids at carboxy end of IgA CH3)
(SEQ ID NO: 512)
gtt gtt tct aga tta tca gtc cac ctc cgc cat gac aac aga cac
HUIGA3T2: (oligo to delete 14 aa at end of IgA-T4) (SEQ ID NO: 513)
gtt gtt tct aga tta tca ttt acc cgc caa gcg gtc gat ggt ctt
NT
2H7 scFv IgAH IgAT4 (SEQ ID NO: 514)
(2H7 scFv IgA 3T1 construct)--truncates the CH3 domain at the 3′end
aagcttgccgccatggattttcaagtgcagattttcagcttcctgctaatcagtgcttcagtcataattgccagag
gacaaattgttctctcccagtctccagcaatcctgtctgcatctccaggggagaaggtcacaatgacttgcagggccagctcaagtg
taagttacatgcactggtaccagcagaagccaggatcctcccccaaaccctggatttatgccccatccaacctggcttctggagtcc
ctgctcgcttcagtggcagtgggtctgggacctcttactctctcacaatcagcagagtggaggctgaagatgctgccacttattactg
ccagcagtggagttttaacccacccacgttcggtgctgggaccaagctggagctgaaagatggcggtggctcgggcggtggtgg
atctggaggaggtgggagctctcaggcttatctacagcagtctggggctgagctggtgaggcctggggcctcagtgaagatgtcct
gcaaggcttctggctacacatttaccagttacaatatgcactgggtaaagcagacacctagacagggcctggaatggattggagct
atttatccaggaaatggtgatacttcctacaatcagaagttcaagggcaaggccacactgactgtagacaaatcctccagcacagcc
tacatgcagctcagcagcctgacatctgaagactctgcggtctatttctgtgcaagagtggtgtactatagtaactcttactggtacttc
gatgtctggggcacagggaccacggtcaccgtctcttctgatcagccagttccctcaactccacctaccccatctccctcaactcca
cctaccccatctccctcatgctgccacccccgactgtcactgcaccgaccggccctcgaggacctgctcttaggttcagaagcgat
cctcacgtgcacactgaccggcctgagagatgcctcaggtgtcaccttcacctggacgccctcaagtgggaagagcgctgttcaa
ggaccacctgaccgtgacctctgtggctgctacagcgtgtccagtgtcctgccgggctgtgccgagccatggaaccatgggaaga
ccttcacttgcactgctgcctaccccgagtccaagaccccgctaaccgccaccctctcaaaatccggaaacacattccggcccgag
gtccacctgctgccgccgccgtcggaggagctggccctgaacgagctggtgacgctgacgtgcctggcacgtggcttcagcccc
aaggatgtgctggttcgctggctgcaggggtcacaggagctgccccgcgagaagtacctgacttgggcatcccggcaggagccc
agccagggcaccaccaccttcgctgtgaccagcatactgcgcgtggcagccgaggactggaagaagggggacaccttctcctg
catggtgggccacgaggccctgccgctggccttcacacagaagaccatcgaccgcttggcgggtaaacccacccatgtcaatgt
gtctgttgtcatggcggaggtggactgataatctaga
AA
2H7 scFv IgAH-T4 (SEQ ID NO: 515)
mdfqvqifsfllisasviiargqivlsqspailsaspgekvtmtcrasssvsymhwyqqkpgsspkpwiy
apsnlasgvparfsgsgsgtsysltisrveaedaatyycqqwsfnpptfgagtklelkdgggsggggsggggssqaylqqsgae
lvrpgasvkmsckasgytftsynmhwvkqtprqglewigaiypgngdtsynqkfkgkatltvdkssstaymqlssltsedsa
vyfcarvvyysnsywyfdvwgtgttvtvssdqpvpstpptpspstpptpspscchprlslhrpaledlllgseailtctltglrdas
gvtftwtpssgksavqgppdrdlcgcysvssvlpgcaepwnhgktftctaaypesktpltatlsksgntfrpevhllpppseelal
nelvtltclargfspkdvlvrwlqgsqelprekyltwasrqepsqgtttfavtsilrvaaedwkkgdtfscmvghealplaftqkti
drlagkpthvnvsvvmaevd
14 amino acids deleted from IgAH-T4 (so that total of 18 amino acids
deleted from wild type IgA CH3 (SEQ ID NO: 516)
PTHVNVSVVMAEVD
IgAH IgA-T18 (Human IgA Tail truncated, 3T2) (SEQ ID NO: 517)
Tgatcagccagttccctcaactccacctaccccatctccctcaactccacctaccccatctccctcatgctgcc
acccccgactgtcactgcaccgaccggccctcgaggacctgctcttaggttcagaagcgatcctcacgtgcacactgaccggcct
gagagatgcctcaggtgtcaccttcacctggacgccctcaagtgggaagagcgctgttcaaggaccacctgaccgtgacctctgt
ggctgctacagcgtgtccagtgtcctgccgggctgtgccgagccatggaaccatgggaagaccttcacttgcactgctgcctaccc
cgagtccaagaccccgctaaccgccaccctctcaaaatccggaaacacattccggcccgaggtccacctgctgccgccgccgtc
ggaggagctggccctgaacgagctggtgacgctgacgtgcctggcacgtggcttcagccccaaggatgtgctggttcgctggct
gcaggggtcacaggagctgccccgcgagaagtacctgacttgggcatcccggcaggagcccagccagggcaccaccaccttc
gctgtgaccagcatactgcgcgtggcagccgaggactggaagaagggggacaccttctcctgcatggtgggccacgaggccct
gccgctggccttcacacagaagaccatcgaccgcttggcgggtaaa
IgAH IgA-T18 Protein sequence: (SEQ ID NO: 518)
dqpvpstpptpspstpptpspscchprlslhrpaledlllgseailtctltglrdasgvtftwtpssgksavqg
ppdrdlcgcysvssvlpgcaepwnhgktftctaaypesktpltatlsksgntfrpevhllpppseelalnelvtltclargfspkdvl
vrwlqgsqelprekyltwasrqepsqgtttfavtsilrvaaedwkkgdtfscmvghealplaftqktidrlagk
NT
2H7 scFv IgAH IgAT18: (Human IgA Tail truncated, 3T2.) (SEQ ID NO:
519)
aagcttgccgccatggattttcaagtgcagattttcagcttcctgctaatcagtgcttcagtcataattgccagag
gacaaattgttctctcccagtctccagcaatcctgtctgcatctccaggggagaaggtcacaatgacttgcagggccagctcaagtg
taagttacatgcactggtaccagcagaagccaggatcctcccccaaaccctggatttatgccccatccaacctggcttctggagtcc
ctgctcgcttcagtggcagtgggtctgggacctcttactctctcacaatcagcagagtggaggctgaagatgctgccacttattactg
ccagcagtggagttttaacccacccacgttcggtgctgggaccaagctggagctgaaagatggcggtggctcgggcggtggtgg
atctggaggaggtgggagctctcaggcttatctacagcagtctggggctgagctggtgaggcctggggcctcagtgaagatgtcct
gcaaggcttctggctacacatttaccagttacaatatgcactgggtaaagcagacacctagacagggcctggaatggattggagct
atttatccaggaaatggtgatacttcctacaatcagaagttcaagggcaaggccacactgactgtagacaaatcctccagcacagcc
tacatgcagctcagcagcctgacatctgaagactctgcggtctatttctgtgcaagagtggtgtactatagtaactcttactggtacttc
gatgtctggggcacagggaccacggtcaccgtctcttctgatcagccagttccctcaactccacctaccccatctccctcaactcca
cctaccccatctccctcatgctgccacccccgactgtcactgcaccgaccggccctcgaggacctgctcttaggttcagaagcgat
cctcacgtgcacactgaccggcctgagagatgcctcaggtgtcaccttcacctggacgccctcaagtgggaagagcgctgttcaa
ggaccacctgaccgtgacctctgtggctgctacagcgtgtccagtgtcctgccgggctgtgccgagccatggaaccatgggaaga
ccttcacttgcactgctgcctaccccgagtccaagaccccgctaaccgccaccctctcaaaatccggaaacacattccggcccgag
gtccacctgctgccgccgccgtcggaggagctggccctgaacgagctggtgacgctgacgtgcctggcacgtggcttcagcccc
aaggatgtgctggttcgctggctgcaggggtcacaggagctgccccgcgagaagtacctgacttgggcatcccggcaggagccc
agccagggcaccaccaccttcgctgtgaccagcatactgcgcgtggcagccgaggactggaagaagggggacaccttctcctg
catggtgggccacgaggccctgccgctggccttcacacagaagaccatcgaccgcttggcgggtaaa
AA:
2H7 scFv IgAH IgAT18: (SEQ ID NO: 520)
mdfqvqifsfllisasviiargqivlsqspailsaspgekvtmtcrasssvsymhwyqqkpgsspkpwiy
apsnlasgvparfsgsgsgtsysltisrveaedaatyycqqwsfnpptfgagtklelkdgggsggggsggggssqaylqqsgae
lvrpgasvkmsckasgytftsynmhwvkqtprqglewigaiypgngdtsynqkfkgkatltvdkssstaymqlssltsedsa
vyfcarvvyysnsywyfdvwgtgttvtvssdqpvpstpptpspstpptpspscchprlslhrpaledlllgseailtctltglrdas
gvtftwtpssgksavqgppdrdlcgcysvssvlpgcaepwnhgktftctaaypesktpltatlsksgntfrpevhllpppseelal
nelvtltclargfspkdvlvrwlqgsqelprekyltwasrqepsqgtttfavtsilrvaaedwkkgdtfscmvghealplaftqkti
drlagk
CTLA-4 IgG WTH WTCH2CH3 (Human-oncoMLP-CTLA4EC-hIgGWT)
(SEQ ID NO: 521)
Nucleotide sequence:
gcaacctacatgatggggaatgagttgaccttcctagatgattccatctgcacgggcacctccagtggaaatc
aagtgaacctcactatccaaggactgagggccatggacacgggactctacatctgcaaggtggagctcatgtacccaccgccata
ctacctgggcataggcaacggaacccagatttatgtaattgatccagaaccgtgcccagattctgatcaacccaaatcttgtgacaaa
actcacacatgcccaccgtgcccagcacctgaactcctggggggaccgtcagtcttcctcttccccccaaaacccaaggacaccct
catgatctcccggacccctgaggtcacatgcgtggtggtggacgtgagccacgaagaccctgaggtcaagttcaactggtacgtg
gacggcgtggaggtgcataatgccaagacaaagccgcgggaggagcagtacaacagcacgtaccgtgtggtcagcgtcctcac
cgtcctgcaccaggactggctgaatggcaaggagtacaagtgcaaggtctccaacaaagccctcccagcccccatcgagaaaac
aatctccaaagccaaagggcagccccgagaaccacaggtgtacaccctgcccccatcccgggatgagctgaccaagaaccagg
tcagcctgacctgcctggtcaaaggcttctatcccagcgacatcgccgtggagtgggagagcaatgggcagccggagaacaact
acaagaccacgcctcccgtgctggactccgacggctccttcttcctctacagcaagctcaccgtggacaagagcaggtggcagca
ggggaacgtcttctcatgctccgtgatgcatgaggctctgcacaaccactacacgcagaagagcctctccctgtctccgggtaaatga
CTLA-4 IgG WTH WTCH2CH3 Protein sequence: (SEQ ID NO: 522)
mgvlltqrtllslvlallfpsmasmamhvaqpavvlassrgiasfvceyaspgkatevrvtvlrqadsqvt
evcaatymmgneltflddsictgtssgnqvnltiqglramdtglyickvelmypppyylgigngtqiyvidpepcpdsdqpks
cdkthtcppcpapellggpsvflfppkpkdtlmisrtpevtcvvvdvshedpevkfnwyvdgvevhnaktkpreeqynstyr
vvsvltvlhqdwlngkeykckvsnkalpapiektiskakgqprepqvytlppsrdeltknqvsltclvkgfypsdiavewesn
gqpennykttppvldsdgsfflyskltvdksrwqqgnvfscsvmhealhnhytqkslslspgk
Human OncoM leader Peptide + CTLA4 EC (BclI) (SEQ ID NO: 523)
Atgggggtactgctcacacagaggacgctgctcagtctggtccttgcactcctgtttccaagcatggcgagc
atggcaatgcacgtggcccagcctgctgtggtactggccagcagccgaggcatcgccagctttgtgtgtgagtatgcatctccagg
caaagccactgaggtccgggtgacagtgcttcggcaggctgacagccaggtgactgaagtctgtgcggcaacctacatgatggg
gaatgagttgaccttcctagatgattccatctgcacgggcacctccagtggaaatcaagtgaacctcactatccaaggactgagggc
catggacacgggactctacatctgcaaggtggagctcatgtacccaccgccatactacctgggcataggcaacggaacccagattt
atgtaattgatccagaaccgtgcccagattctgatcaa
Human OncoM leader Peptide + CTLA4 EC Peptide sequence: (SEQ ID
NO: 524)
mgvlltqrtllslvlallfpsmasmamhvaqpavvlassrgiasfvceyaspgkatevrvtvlrqadsqvt
evcaatymmgneltflddsictgtssgnqvnltiqglramdtglyickvelmypppyylgigngtqiyvidpepcpdsdq
Human OncoM leader peptide nucleotide (SEQ ID NO: 525)
atgggggtactgctcacacagaggacgctgctcagtctggtccttgcactcctgtttccaagcatggcgagc
atg
Human OncoM leader peptide sequence (SEQ ID NO: 526):
Mgvlltqrtllslvlallfpsm
NT
Human CTLA4 EC (no LP) (SEQ ID NO: 527)
Gcaatgcacgtggcccagcctgctgtggtactggccagcagccgaggcatcgccagctttgtgtgtgagta
tgcatctccaggcaaagccactgaggtccgggtgacagtgcttcggcaggctgacagccaggtgactgaagtctgtgcggcaac
ctacatgacggggaatgagttgaccttcctagatgattccatctgcacgggcacctccagtggaaatcaagtgaacctcactatcca
aggactgagggccatggacacgggactctacatctgcaaggtggagctcatgtacccaccgccatactacctgggcataggcaa
cggaacccagatttatgtaattgatccagaaccgtgcccagattct
AA
Human CTLA4 EC (no LP) (SEQ ID NO: 528)
Amhvaqpavvlassrgiasfvceyaspgkatevrvtvlrqadsqvtevcaatymtgneltflddsictgts
sgnqvnltiqglramdtglyickvelmypppyylgigngtqiyvidpepcpds
NT
Human CTLA4 IgG MTH (SSS) MTCH2CH3 (SEQ ID NO: 529)
Atgggggtactgctcacacagaggacgctgctcagtctggtccttgcactcctgtttccaagcatggcgagc
atggcaatgcacgtggcccagcctgctgtggtactggccagcagccgaggcatcgccagctttgtgtgtgagtatgcatctccagg
caaagccactgaggtccgggtgacagtgcttcggcaggctgacagccaggtgactgaagtctgtgcggcaacctacatgatggg
gaatgagttgaccttcctagatgattccatctgcacgggcacctccagtggaaatcaagtgaacctcactatccaaggactgagggc
catggacacgggactctacatctgcaaggtggagctcatgtacccaccgccatactacctgggcataggcaacggaacccagattt
atgtaattgatccagaaccgtgcccagattctgatcaacccaaatcttctgacaaaactcacacatccccaccgtccccagcacctga
actcctggggggatcgtcagtcttcctcttccccccaaaacccaaggacaccctcatgatctcccggacccctgaggtcacatgcgt
ggtggtggacgtgagccacgaagaccctgaggtcaagttcaactggtacgtggacggcgtggaggtgcataatgccaagacaaa
gccgcgggaggagcagtacaacagcacgtaccgtgtggtcagcgtcctcaccgtcctgcaccaggactggctgaatggcaagg
agtacaagtgcaaggtctccaacaaagccctcccagcccccatcgagaaaacaatctccaaagccaaagggcagccccgagaa
ccacaggtgtacaccctgcccccatcccgggatgagctgaccaagaaccaggtcagcctgacctgcctggtcaaaggcttctatc
ccagcgacatcgccgtggagtgggagagcaatgggcagccggagaacaactacaagaccacgcctcccgtgctggactccga
cggctccttcttcctctacagcaagctcaccgtggacaagagcaggtggcagcaggggaacgtcttctcatgctccgtgatgcatg
aggctctgcacaaccactacacgcagaagagcctctccctgtctccgggtaaatga
AA
Human CTLA4 IgG MTH (SSS) MTCH2CH3 (SEQ ID NO: 530)
Mgvlltqrtllslvlallfpsmasmamhvaqpavvlassrgiasfvceyaspgkatevrvtvlrqadsqvt
evcaatymmgneltflddsictgtssgnqvnltiqglramdtglyickvelmypppyylgigngtqiyvidpepcpdsdqpks
sdkthtsppspapellggssvflfppkpkdtlmisrtpevtcvvvdvshedpevkfnwyvdgvevhnaktkpreeqynstyr
vvsvltvlhqdwlngkeykckvsnkalpapiektiskakgqprepqvytlppsrdeltknqvsltclvkgfypsdiavewesn
gqpennykttppvldsdgsfflyskltvdksrwqqgnvfscsvmhealhnhytqkslslspgk
CTLA-4 IgAH IgACH2CH3 (Human-oncoMLP-CTLA4EC-IgA) (SEQ ID
NO: 531)
Nucleotide sequence:
atgggggtactgctcacacagaggacgctgctcagtctggtccttgcactcctgtttccaagcatggcgagc
atggcaatgcacgtggcccagcctgctgtggtactggccagcagccgaggcatcgccagctttgtgtgtgagtatgcatctccagg
caaagccactgaggtccgggtgacagtgcttcggcaggctgacagccaggtgactgaagtctgtgcggcaacctacatgatggg
gaatgagttgaccttcctagatgattccatctgcacgggcacctccagtggaaatcaagtgaacctcactatccaaggactgagggc
catggacacgggactctacatctgcaaggtggagctcatgtacccaccgccatactacctgggcataggcaacggaacccagattt
atgtaattgatccagaaccgtgcccagattctgatcagccagttccctcaactccacctaccccatctccctcaactccacctacccca
tctccctcatgctgccacccccgactgtcactgcaccgaccggccctcgaggacctgctcttaggttcagaagcgatcctcacgtgc
acactgaccggcctgagagatgcctcaggtgtcaccttcacctggacgccctcaagtgggaagagcgctgttcaaggaccacctg
accgtgacctctgtggctgctacagcgtgtccagtgtcctgccgggctgtgccgagccatggaaccatgggaagaccttcacttgc
actgctgcctaccccgagtccaagaccccgctaaccgccaccctctcaaaatccggaaacacattccggcccgaggtccacctgc
tgccgccgccgtcggaggagctggccctgaacgagctggtgacgctgacgtgcctggcacgtggcttcagccccaaggatgtgc
tggttcgctggctgcaggggtcacaggagctgccccgcgagaagtacctgacttgggcatcccggcaggagcccagccagggc
accaccaccttcgctgtgaccagcatactgcgcgtggcagccgaggactggaagaagggggacaccttctcctgcatggtgggc
cacgaggccctgccgctggccttcacacagaagaccatcgaccgcttggcgggtaaacccacccatgtcaatgtgtctgttgtcat
ggcggaggtggacggcacctgctactgataatctaga
CTLA-4 IgAH IgACH2CH3 Protein sequence (SEQ ID NO: 532):
mgvlltqrtllslvlallfpsmasmamhvaqpavvlassrgiasfvceyaspgkatevrvtvlrqadsqvt
evcaatymmgneltflddsictgtssgnqvnltiqglramdtglyickvelmypppyylgigngtqiyvidpepcpdsdqpv
pstpptpspstpptpspscchprlslhrpaledlllgseailtctltglrdasgvtftwtpssgksavqgppdrdlcgcysvssvlpg
caepwnhgktftctaaypesktpltatlsksgntfrpevhllpppseelalnelvtltclargfspkdvlvrwlqgsqelprekylt
wasrqepsqgtttfavtsilrvaaedwkkgdtfscmvghealplaftqktidrlagkpthvnvsvvmaevdgtcy
CTLA-4 IgAH IgA-T4 (Human-oncoMLP-CTLA4EC-IgA3T1) (SEQ ID
NO: 533)
Nucleotide sequence:
atgggggtactgctcacacagaggacgctgctcagtctggtccttgcactcctgtttccaagcatggcgagc
atggcaatgcacgtggcccagcctgctgtggtactggccagcagccgaggcatcgccagctttgtgtgtgagtatgcatctccagg
caaagccactgaggtccgggtgacagtgcttcggcaggctgacagccaggtgactgaagtctgtgcggcaacctacatgatggg
gaatgagttgaccttcctagatgattccatctgcacgggcacctccagtggaaatcaagtgaacctcactatccaaggactgagggc
catggacacgggactctacatctgcaaggtggagctcatgtacccaccgccatactacctgggcataggcaacggaacccagattt
atgtaattgatccagaaccgtgcccagattctgatcagccagttccctcaactccacctaccccatctccctcaactccacctacccca
tctccctcatgctgccacccccgactgtcactgcaccgaccggccctcgaggacctgctcttaggttcagaagcgatcctcacgtgc
acactgaccggcctgagagatgcctcaggtgtcaccttcacctggacgccctcaagtgggaagagcgctgttcaaggaccacctg
accgtgacctctgtggctgctacagcgtgtccagtgtcctgccgggctgtgccgagccatggaaccatgggaagaccttcacttgc
actgctgcctaccccgagtccaagaccccgctaaccgccaccctctcaaaatccggaaacacattccggcccgaggtccacctgc
tgccgccgccgtcggaggagctggccctgaacgagctggtgacgctgacgtgcctggcacgtggcttcagccccaaggatgtgc
tggttcgctggctgcaggggtcacaggagctgccccgcgagaagtacctgacttgggcatcccggcaggagcccagccagggc
accaccaccttcgctgtgaccagcatactgcgcgtggcagccgaggactggaagaagggggacaccttctcctgcatggtgggc
cacgaggccctgccgctggccttcacacagaagaccatcgaccgcttggcgggtaaacccacccatgtcaatgtgtctgttgtcat
ggcggaggtggactgataatctaga
CTLA-4 IgAH IgA-T4 Protein sequence (SEQ ID NO: 534):
Mgvlltqrtllslvlallfpsmasmamhvaqpavvlassrgiasfvceyaspgkatevrvtvlrqadsqvt
evcaatymmgneltflddsictgtssgnqvnltiqglramdtglyickvelmypppyylgigngtqiyvidpepcpdsdqpv
pstpptpspstpptpspscchprlslhrpaledlllgseailtctltglrdasgvtftwtpssgksavqgppdrdlcgcysvssvlpg
caepwnhgktftctaaypesktpltatlsksgntfrpevhllpppseelalnelvtltclargfspkdvlvrwlqgsqelprekylt
wasrqepsqgtttfavtsilrvaaedwkkgdtfscmvghealplaftqktidrlagkpthvnvsvvmaevd
NT
human IgG1 CH2 with 238 mutation pro→ser (SEQ ID NO: 535)
cctgaactcctggggggatcgtcagtcttcctcttccccccaaaacccaaggacaccctcatgatctcccgga
cccctgaggtcacatgcgtggtggtggacgtgagccacgaagaccctgaggtcaagttcaactggtacgtggacggcgtggagg
tgcataatgccaagacaaagccgcgggaggagcagtacaacagcacgtaccgtgtggtcagcgtcctcaccgtcctgcaccagg
actggctgaatggcaaggagtacaagtgcaaggtctccaacaaagccctcccagcccccatcgagaaaaccatctccaaagcca
aag
AA
human IgG1 CH2 with 238 mutation pro→ser (SEQ ID NO: 536)
pellggssvflfppkpkdtlmisrtpevtcvvvdvshedpevkfnwyvdgvevhnaktkpreeqynst
yrvvsvltvlhqdwlngkeykckvsnkalpapiektiskak
Amino acids surrounding Pro to Ser in CH2 (SEQ ID NO: 537)
PAPELLGGPS
Amino acids surrounding Pro to Ser in CH2 (SEQ ID NO: 538)
PAPELLGGSS
HIgE5Bcl (SEQ ID NO: 539)
gtt gtt gat cac gtc tgc tcc agg gac ttc acc cc
hIgE3stop (SEQ ID NO: 540)
gtt gtt tct aga tta act ttt acc ggg att tac aga cac cgc tcg ctg g
hIgE3BB (leaves an open reading frame at end of gene to read into
transmembrane and cytoplasmic tail domain attached at either the BamHI or SfuI sites)
(SEQ ID NO: 541)
gtt gtt ttc gaa gga tcc gct tta ccg gga ttt aca gac acc gct cgc tgg
NT
human IgE Fc (CH2—CH3—CH4) ORF (SEQ ID NO: 542):
tgatcacgtctgctccagggacttcaccccgcccaccgtgaagatcttacagtcgtcctgcgacggcggcg
ggcacttccccccgaccatccagctcctgtgcctcgtctctgggtacaccccagggactatcaacatcacctggctggaggacgg
gcaggtcatggacgtggacttgtccaccgcctctaccacgcaggagggtgagctggcctccacacaaagcgagctcaccctcag
ccagaagcactggctgtcagaccgcacctacacctgccaggtcacctatcaaggtcacacctttgaggacagcaccaagaagtgt
gcagattccaacccgagaggggtgagcgcctacctaagccggcccagcccgttcgacctgttcatccgcaagtcgcccacgatc
acctgtctggtggtggacctggcacccagcaaggggaccgtgaacctgacctggtcccgggccagtgggaagcctgtgaacca
ctccaccagaaaggaggagaagcagcgcaatggcacgttaaccgtcacgtccaccctgccggtgggcacccgagactggatcg
agggggagacctaccagtgcagggtgacccacccccacctgcccagggccctcatgcggtccacgaccaagaccagcggccc
gcgtgctgccccggaagtctatgcgtttgcgacgccggagtggccggggagccgggacaagcgcaccctcgcctgcctgatcc
agaacttcatgcctgaggacatctcggtgcagtggctgcacaacgaggtgcagctcccggacgcccggcacagcacgacgcag
ccccgcaagaccaagggctccggcttcttcgtcttcagccgcctggaggtgaccagggccgaatgggagcagaaagatgagttc
atctgccgtgcagtccatgaggcagcgagcccctcacagaccgtccagcgagcggtgtctgtaaatcccggtaaagcggatcctt
cgaa
AA
human IgE Fc (CH2—CH3—CH4) ORF (SEQ ID NO: 543):
dhvcsrdftpptvkilqsscdggghfpptiqllclvsgytpgtinitwledgqvmdvdlstasttqegelast
qseltlsqkhwlsdrtytcqvtyqghtfedstkkcadsnprgvsaylsrpspfdlfirksptitclvvdlapskgtvnltwsrasgk
pvnhstrkeekqrngtltvtstlpvgtrdwiegetyqcrvthphlpralmrsttktsgpraapevyafatpewpgsrdkrtlacliq
nfmpedisvqwlhnevqlpdarhsttqprktkgsgffvfsrlevtraeweqkdeficravheaaspsqtvqravsvnpgkadps
IFhIgGwtBcl5 (SEQ ID NO: 544)
gtt gtt tga tca gga gcc caa atc ttg tga caa aac tca cac atg ccc acc gtg ccc agc
acc (63 mer)
hIgGWT3xba (SEQ ID NO: 545)
gtt gtt tct aga tca ttt acc cgg aga cag gga gag gct ctt ctg cgt gta g
HuIgGMHWC (sense, 5′ primer for mutating wild type hinge CCC to
mutant SSS (SEQ ID NO: 546)
gtt gtt gat cag gag ccc aaa tct tct gac aaa act cac aca tct cca ccg tcc cca gca
cct gaa ctc ctg ggt gga ccg tca gtc ttc c
NT
1D8 VH (SEQ ID NO: 547)
caggtgcagctgaaggaggcaggacctggcctggtgcaaccgacacagaccctgtccctcacatgcactg
tctctgggttctcattaaccagcgatggtgtacactggattcgacagcctccaggaaagggtctggaatggatgggaataatatattat
gatggaggcacagattataattcagcaattaaatccagactgagcatcagcagggacacctccaagagccaagttttcttaaaaatc
aacagtctgcaaactgatgacacagccatgtattactgtgccagaatccactttgattactggggccaaggagtcatggtcacagtct
cctct
AA
1D8 VH (no leader) (SEQ ID NO: 548)
qvqlkeagpglvqptqtlsltctvsgfsltsdgvhwirqppgkglewmgiiyydggtdynsaiksrlsisr
dtsksqvflkinslqtddtamyycarihfdywgqgvmvtvss
NT
1D8 VL (no leader) (SEQ ID NO: 549)
gacattgtgctcactcagtctccaacaaccatagctgcatctccaggggagaaggtcaccatcacctgccgt
gccagctccagtgtaagttacatgtactggtaccagcagaagtcaggcgcctcccctaaactctggatttatgacacatccaagctg
gcttctggagttccaaatcgcttcagtggcagtgggtctgggacctcttattctctcgcaatcaacaccatggagactgaagatgctg
ccacttattactgtcagcagtggagtagtactccgctcacgttcgggtctgggaccaagctggagatcaaacgg
AA
1D8 VL (SEQ ID NO: 550)
divltqspttiaaspgekvtitcrasssvsymywyqqksgaspklwiydtsklasgvpnrfsgsgsgtsys
laintmetedaatyycqqwsstpltfgsgtkleikr
NT
1D8 scFv (SEQ ID NO: 551)
aagcttatggattttcaagtgcagattttcagcttcctgctaatcagtgcttcagtcataatgtccagaggagtcg
acattgtgctcactcagtctccaacaaccatagctgcatctccaggggagaaggtcaccatcacctgccgtgccagctccagtgtaa
gttacatgtactggtaccagcagaagtcaggcgcctcccctaaactctggatttatgacacatccaagctggcttctggagttccaaa
tcgcttcagtggcagtgggtctgggacctcttattctctcgcaatcaacaccatggagactgaagatgctgccacttattactgtcagc
agtggagtagtactccgctcacgttcgggtctgggaccaagctggagatcaaacggggtggcggtggctcgggcggtggtgggt
cgggtggcggcggatctcaggtgcagctgaaggaggcaggacctggcctggtgcaaccgacacagaccctgtccctcacatgc
actgtctctgggttctcattaaccagcgatggtgtacactggattcgacagcctccaggaaagggtctggaatggatgggaataatat
attatgatggaggcacagattataattcagcaattaaatccagactgagcatcagcagggacacctccaagagccaagttttcttaaa
aatcaacagtctgcaaactgatgacacagccatgtattactgtgccagaatccactttgattactggggccaaggagtcatggtcaca
gtctcctctgatca
AA
1D8 scFv (SEQ ID NO: 552)
mdfqvqifsfllisasvimsrgvdivltqspttiaaspgekvtitcrasssvsymywyqqksgaspklwiy
dtsklasgvpnrfsgsgsgtsyslaintmetedaatyycqqwsstpltfgsgtkleikrggggsggggsggggsqvqlkeagpg
lvqptqtlsltctvsgfsltsdgvhwirqppgkglewmgiiyydggtdynsaiksrlsisrdtsksqvflkinslqtddtamyyca
rihfdywgqgvmvtvss
NT
1D8 scFv IgG WTH WTCH2CH3 (SEQ ID NO: 553)
aagcttatggattttcaagtgcagattttcagcttcctgctaatcagtgcttcagtcataatgtccagaggagtcg
acattgtgctcactcagtctccaacaaccatagctgcatctccaggggagaaggtcaccatcacctgccgtgccagctccagtgtaa
gttacatgtactggtaccagcagaagtcaggcgcctcccctaaactctggatttatgacacatccaagctggcttctggagttccaaa
tcgcttcagtggcagtgggtctgggacctcttattctctcgcaatcaacaccatggagactgaagatgctgccacttattactgtcagc
agtggagtagtactccgctcacgttcgggtctgggaccaagctggagatcaaacggggtggcggtggctcgggcggtggtgggt
cgggtggcggcggatctcaggtgcagctgaaggaggcaggacctggcctggtgcaaccgacacagaccctgtccctcacatgc
actgtctctgggttctcattaaccagcgatggtgtacactggattcgacagcctccaggaaagggtctggaatggatgggaataatat
attatgatggaggcacagattataattcagcaattaaatccagactgagcatcagcagggacacctccaagagccaagttttcttaaa
aatcaacagtctgcaaactgatgacacagccatgtattactgtgccagaatccactttgattactggggccaaggagtcatggtcaca
gtctcctctgatcaggagcccaaatcttgtgacaaaactcacacatgcccaccgtgcccagcacctgaactcctggggggaccgtc
agtcttcctcttccccccaaaacccaaggacaccctcatgatctcccggacccctgaggtcacatgcgtggtggtggacgtgagcc
acgaagaccctgaggtcaagttcaactggtacgtggacggcgtggaggtgcataatgccaagacaaagccgcgggaggagcag
tacaacagcacgtaccgtgtggtcagcgtcctcaccgtcctgcaccaggactggctgaatggcaaggagtacaagtgcaaggtct
ccaacaaagccctcccagcccccatcgagaaaacaatctccaaagccaaagggcagccccgagaaccacaggtgtacaccctg
cccccatcccgggatgagctgaccaagaaccaggtcagcctgacctgcctggtcaaaggcttctatcccagcgacatcgccgtgg
agtgggagagcaatgggcagccggagaacaactacaagaccacgcctcccgtgctggactccgacggctccttcttcctctacag
caagctcaccgtggacaagagcaggtggcagcaggggaacgtcttctcatgctccgtgatgcatgaggctctgcacaaccactac
acgcagaagagcctctccctgtctccgggtaaatgatctaga
AA
1D8 scFv IgG WTH WTCH2CH3 (SEQ ID NO: 554)
mdfqvqifsfllisasvimsrgvdivltqspttiaaspgekvtitcrasssvsymywyqqksgaspklwiy
dtsklasgvpnrfsgsgsgtsyslaintmetedaatyycqqwsstpltfgsgtkleikrggggsggggsggggsqvqlkeagpg
lvqptqtlsltctvsgfsltsdgvhwirqppgkglewmgiiyydggtdynsaiksrlsisrdtsksqvflkinslqtddtamyyca
rihfdywgqgvmvtvssdqepkscdkthtcppcpapellggpsvflfppkpkdtlmisrtpevtcvvvdvshedpevkfnw
yvdgvevhnaktkpreeqynstyrvvsvltvlhqdwlngkeykckvsnkalpapiektiskakgqprepqvytlppsrdeltk
nqvsltclvkgfypsdiavewesngqpennykttppvldsdgsfflyskltvdksrwqqgnvfscsvmhealhnhytqkslsl
spgk
NT
1D8 scFv IgG MTH MTCH2CH3-CD80 (SEQ ID NO: 555)
aagcttatggattttcaagtgcagattttcagcttcctgctaatcagtgcttcagtcataatgtccagaggagtcg
acattgtgctcactcagtctccaacaaccatagctgcatctccaggggagaaggtcaccatcacctgccgtgccagctccagtgtaa
gttacatgtactggtaccagcagaagtcaggcgcctcccctaaactctggatttatgacacatccaagctggcttctggagttccaaa
tcgcttcagtggcagtgggtctgggacctcttattctctcgcaatcaacaccatggagactgaagatgctgccacttattactgtcagc
agtggagtagtactccgctcacgttcgggtctgggaccaagctggagatcaaacggggtggcggtggctcgggcggtggtgggt
cgggtggcggcggatctcaggtgcagctgaaggaggcaggacctggcctggtgcaaccgacacagaccctgtccctcacatgc
actgtctctgggttctcattaaccagcgatggtgtacactggattcgacagcctccaggaaagggtctggaatggatgggaataatat
attatgatggaggcacagattataattcagcaattaaatccagactgagcatcagcagggacacctccaagagccaagttttcttaaa
aatcaacagtctgcaaactgatgacacagccatgtattactgtgccagaatccactttgattactggggccaaggagtcatggtcaca
gtctcctctgatctggagcccaaatcttctgacaaaactcacacaagcccaccgagcccagcacctgaactcctggggggatcgtc
agtcttcctcttccccccaaaacccaaggacaccctcatgatctcccggacccctgaggtcacatgcgtggtggtggacgtgagcc
acgaagaccctgaggtcaagttcaactggtacgtggacggcgtggaggtgcataatgccaagacaaagccgcgggaggagcag
tacaacagcacgtaccgtgtggtcagcgtcctcaccgtcctgcaccaggactggctgaatggcaaggagtacaagtgcaaggtct
ccaacaaagccctcccagcccccatcgagaaaaccatctccaaagccaaagggcagccccgagaaccacaggtgtacaccctg
cccccatcccgggatgagctgaccaagaaccaggtcagcctgacctgcctggtcaaaggcttctatcccagcgacatcgccgtgg
agtgggagagcaatgggcagccggagaacaactacaagaccacgcctcccgtgctggactccgacggctccttcttcctctacag
caagctcaccgtggacaagagcaggtggcagcaggggaacgtcttctcatgctccgtgatgcatgaggctctgcacaaccactac
acgcagaagagcctctccctgtctccgggtaaagcggatccttcgaacctgctcccatcctgggccattaccttaatctcagtaaatg
gaatttttgtgatatgctgcctgacctactgctttgccccaagatgcagagagagaaggaggaatgagagattgagaagggaaagt
gtacgccctgtataaatcgata
AA
1D8 scFv IgG MTH MTCH2CH3-CD80 (SEQ ID NO: 556)
mdfqvqifsfllisasvimsrgvdivltqspttiaaspgekvtitcrasssvsymywyqqksgaspklwiy
dtsklasgvpnrfsgsgsgtsyslaintmetedaatyycqqwsstpltfgsgtkleikrggggsggggsggggsqvqlkeagpg
lvqptqtlsltctvsgfsltsdgvhwirqppgkglewmgiiyydggtdynsaiksrlsisrdtsksqvflkinslqtddtamyyca
rihfdywgqgvmvtvssdlepkssdkthtsppspapellggssvflfppkpkdtlmisrtpevtcvvvdvshedpevkfnwy
vdgvevhnaktkpreeqynstyrvvsvltvlhqdwlngkeykckvsnkalpapiektiskakgqprepqvytlppsrdeltkn
qvsltclvkgfypsdiavewesngqpennykttppvldsdgsfflyskltvdksrwqqgnvfscsvmhealhnhytqkslsls
pgkadpsnllpswaitlisvngifviccltycfaprcrerrrnerlrresvrpv
NT
1D8 scFv IgG WTH WTCH2CH3-CD80 (SEQ ID NO: 557)
aagcttatggattttcaagtgcagattttcagcttcctgctaatcagtgcttcagtcataatgtccagaggagtcg
acattgtgctcactcagtctccaacaaccatagctgcatctccaggggagaaggtcaccatcacctgccgtgccagctccagtgtaa
gttacatgtactggtaccagcagaagtcaggcgcctcccctaaactctggatttatgacacatccaagctggcttctggagttccaaa
tcgcttcagtggcagtgggtctgggacctcttattctctcgcaatcaacaccatggagactgaagatgctgccacttattactgtcagc
agtggagtagtactccgctcacgttcgggtctgggaccaagctggagatcaaacggggtggcggtggctcgggcggtggtgggt
cgggtggcggcggatctcaggtgcagctgaaggaggcaggacctggcctggtgcaaccgacacagaccctgtccctcacatgc
actgtctctgggttctcattaaccagcgatggtgtacactggattcgacagcctccaggaaagggtctggaatggatgggaataatat
attatgatggaggcacagattataattcagcaattaaatccagactgagcatcagcagggacacctccaagagccaagttttcttaaa
aatcaacagtctgcaaactgatgacacagccatgtattactgtgccagaatccactttgattactggggccaaggagtcatggtcaca
gtctcctctgatctggagcccaaatcttgtgacaaaactcacacatgcccaccgtgcccagcacctgaactcctggggggaccgtc
agtcttcctcttccccccaaaacccaaggacaccctcatgatctcccggacccctgaggtcacatgcgtggtggtggacgtgagcc
acgaagaccctgaggtcaagttcaactggtacgtggacggcgtggaggtgcataatgccaagacaaagccgcgggaggagcag
tacaacagcacgtaccgtgtggtcagcgtcctcaccgtcctgcaccaggactggctgaatggcaaggagtacaagtgcaaggtct
ccaacaaagccctcccagcccccatcgagaaaaccatctccaaagccaaagggcagccccgagaaccacaggtgtacaccctg
cccccatcccgggatgagctgaccaagaaccaggtcagcctgacctgcctggtcaaaggcttctatcccagcgacatcgccgtgg
agtgggagagcaatgggcagccggagaacaactacaagaccacgcctcccgtgctggactccgacggctccttcttcctctacag
caagctcaccgtggacaagagcaggtggcagcaggggaacgtcttctcatgctccgtgatgcatgaggctctgcacaaccactac
acgcagaagagcctctccctgtctccgggtaaagcggatccttcgaacctgctcccatcctgggccattaccttaatctcagtaaatg
gaatttttgtgatatgctgcctgacctactgctttgccccaagatgcagagagagaaggaggaatgagagattgagaagggaaagt
gtacgccctgtataaatcgata
AA
1D8 scFv IgG WTH WTCH2CH3-CD80 (SEQ ID NO: 558)
mdfqvqifsfllisasvimsrgvdivltqspttiaaspgekvtitcrasssvsymywyqqksgaspklwiy
dtsklasgvpnrfsgsgsgtsyslaintmetedaatyycqqwsstpltfgsgtkleikrggggsggggsggggsqvqlkeagpg
lvqptqtlsltctvsgfsltsdgvhwirqppgkglewmgiiyydggtdynsaiksrlsisrdtsksqvflkinslqtddtamyyca
rihfdywgqgvmvtvssdlepkscdkthtcppcpapellggpsvflfppkpkdtlmisrtpevtcvvvdvshedpevkfnw
yvdgvevhnaktkpreeqynstyrvvsvltvlhqdwlngkeykckvsnkalpapiektiskakgqprepqvytlppsrdeltk
nqvsltclvkgfypsdiavewesngqpennykttppvldsdgsfflyskltvdksrwqqgnvfscsvmhealhnhytqkslsl
spgkadpsnllpswaitlisvngifviccltycfaprcrerrrnerlrresvrpv
NT
Anti human CD3 scFv WTH WTCH2CH3 (SEQ ID NO: 559)
aagcttatggattttcaagtgcagattttcagcttcctgctaatcagtgcttcagtcataatgtccagaggagtcg
acatccagatgacacagactacatcctccctgtctgcctctctgggagacagagtcaccatcagttgcagggcaagtcaggacattc
gcaattatttaaactggtatcagcagaaaccagatggaactgttaaactcctgatctactacacatcaagattacactcaggagtccca
tcaaggttcagtggcagtgggtctggaacagattattctctcaccattgccaacctgcaaccagaagatattgccacttacttttgcca
acagggtaatacgcttccgtggacgttcggtggaggcaccaaactggtaaccaaacgggagctcggtggcggtggctcgggcg
gtggtgggtcgggtggcggcggatctatcgatgaggtccagctgcaacagtctggacctgaactggtgaagcctggagcttcaat
gtcctgcaaggcctctggttactcattcactggctacatcgtgaactggctgaagcagagccatggaaagaaccttgagtggattgg
acttattaatccatacaaaggtcttactacctacaaccagaaattcaagggcaaggccacattaactgtagacaagtcatccagcaca
gcctacatggagctcctcagtctgacatctgaagactctgcagtctattactgtgcaagatctgggtactatggtgactcggactggta
cttcgatgtctggggcgcagggaccacggtcaccgtctcctctgatcaggagcccaaatcttgtgacaaaactcacacatgcccac
cgtgcccagcacctgaactcctggggggaccgtcagtcttcctcttccccccaaaacccaaggacaccctcatgatctcccggacc
cctgaggtcacatgcgtggtggtggacgtgagccacgaagaccctgaggtcaagttcaactggtacgtggacggcgtggaggtg
cataatgccaagacaaagccgcgggaggagcagtacaacagcacgtaccgtgtggtcagcgtcctcaccgtcctgcaccagga
ctggctgaatggcaaggagtacaagtgcaaggtctccaacaaagccctcccagcccccatcgagaaaacaatctccaaagccaa
agggcagccccgagaaccacaggtgtacaccctgcccccatcccgggatgagctgaccaagaaccaggtcagcctgacctgcc
tggtcaaaggcttctatcccagcgacatcgccgtggagtgggagagcaatgggcagccggagaacaactacaagaccacgcctc
ccgtgctggactccgacggctccttcttcctctacagcaagctcaccgtggacaagagcaggtggcagcaggggaacgtcttctca
tgctccgtgatgcatgaggctctgcacaaccactacacgcagaagagcctctccctgtctccgggtaaatgatctaga
AA
Anti human CD3 scFv WTH WTCH2CH3 (SEQ ID NO: 560)
Mdfqvqifsfllisasvimsrgvdiqmtqttsslsaslgdrvtiscrasqdirnylnwyqqkpdgtvklliy
ytsrlhsgvpsrfsgsgsgtdysltianlqpediatyfcqqgntlpwtfgggtklvtkrelggggsggggsggggsidevqlqqsg
pelvkpgasmsckasgysftgyivnwlkqshgknlewiglinpykglttynqkfkgkatltvdkssstaymellsltsedsavy
ycarsgyygdsdwyfdvwgagttvtvssdqepkscdkthtcppcpapellggpsvflfppkpkdtlmisrtpevtcvvvdvs
hedpevkfnwyvdgvevhnaktkpreeqynstyrvvsvltvlhqdwlngkeykckvsnkalpapiektiskakgqprepq
vytlppsrdeltknqvsltclvkgfypsdiavewesngqpennykttppvldsdgsfflyskltvdksrwqqgnvfscsvmhe
alhnhytqkslslspgk
NT
2H7-antiCD40 scFv MTH (SSS) MTCH2WTCH3 (SEQ ID NO: 561)
2h7-40.2.220Ig + restriction sites
aagcttgccgccatggattttcaagtgcagattttcagcttcctgctaatcagtgcttcagtcataattgccagag
gacaaattgttctctcccagtctccagcaatcctgtctgcatctccaggggagaaggtcacaatgacttgcagggccagctcaagtg
taagttacatgcactggtaccagcagaagccaggatcctcccccaaaccctggatttatgccccatccaacctggcttctggagtcc
ctgctcgcttcagtggcagtgggtctgggacctcttactctctcacaatcagcagagtggaggctgaagatgctgccacttattactg
ccagcagtggagttttaacccacccacgttcggtgctgggaccaagctggagctgaaaggtggcggtggctcgggcggtggtgg
atctggaggaggtgggagctctcaggcttatctacagcagtctggggctgagctggtgaggcctggggcctcagtgaagatgtcct
gcaaggcttctggctacacatttaccagttacaatatgcactgggtaaagcagacacctagacagggcctggaatggattggagct
atttatccaggaaatggtgatacttcctacaatcagaagttcaagggcaaggccacactgactgtagacaaatcctccagcacagcc
tacatgcagctcagcagcctgacatctgaagactctgcggtctatttctgtgcaagagtggtgtactatagtaactcttactggtacttc
gatgtctggggcacagggaccacggtcaccgtctcttctgatcaatccaactctgaagaagcaaagaaagaggaggccaaaaag
gaggaagccaagaaatctaacagcgtcgacattgttctgactcagtctccagccaccctgtctgtgactccaggagatagagtctct
ctttcctgcagggccagccagagtattagcgactacttacactggtatcaacaaaaatcacatgagtctccaaggcttctcatcaaata
tgcttcccattccatctctgggatcccctccaggttcagtggcagtggatcagggtcagatttcactctcagtatcaacagtgtggaac
ctgaagatgttggaatttattactgtcaacatggtcacagctttccgtggacgttcggtggaggcaccaagctggaaatcaaacggg
gtggcggtggctcgggcggaggtgggtcgggtggcggcggatctcagatccagttggtgcaatctggacctgagctgaagaag
cctggagagacagtcaggatctcctgcaaggcttctgggtatgccttcacaactactggaatgcagtgggtgcaagagatgccagg
aaagggtttgaagtggattggctggataaacaccccactctggagtgccaaaatatgtagaagacttcaaggacggtttgccttctct
ttggaaacctctgccaacactgcatatttacagataagcaacctcaaagatgaggacacggctacgtatttctgtgtgagatccggga
atggtaactatgacctggcctactttgcttactggggccaagggacactggtcactgtctctgatcaggagcccaaatcttctgacaa
aactcacacatccccaccgtccccagcacctgaactcctggggggatcgtcagtcttcctcttccccccaaaacccaaggacaccc
tcatgatctcccggacccctgaggtcacatgcgtggtggtggacgtgagccacgaagaccctgaggtcaagttcaactggtacgtg
gacggcgtggaggtgcataatgccaagacaaagccgcgggaggagcagtacaacagcacgtaccgtgtggtcagcgtcctcac
cgtcctgcaccaggactggctgaatggcaaggagtacaagtgcaaggtctccaacaaagccctcccagcccccatcgagaaaac
aatctccaaagccaaagggcagccccgagaaccacaggtgtacaccctgcccccatcccgggatgagctgaccaagaaccagg
tcagcctgacctgcctggtcaaaggcttctatcccagcgacatcgccgtggagtgggagagcaatgggcagccggagaacaact
acaagaccacgcctcccgtgctggactccgacggctccttcttcctctacagcaagctcaccgtggacaagagcaggtggcagca
ggggaacgtcttctcatgctccgtgatgcatgaggctctgcacaaccactacacgcagaagagcctctccctgtctccgggtaaatg
atctaga
AA
2H7-antiCD40 scFv MTH (SSS) MTCH2WTCH3 (SEQ ID NO: 562)
2H7-40.2.220Ig
mdfqvqifsfllisasviiargqivlsqspailsaspgekvtmtcrasssvsymhwyqqkpgsspkpwiy
apsnlasgvparfsgsgsgtsysltisrveaedaatyycqqwsfnpptfgagtklelkggggsggggsggggssqaylqqsgae
lvrpgasvkmsckasgytftsynmhwvkqtprqglewigaiypgngdtsynqkfkgkatltvdkssstaymqlssltsedsa
vyfcarvvyysnsywyfdvwgtgttvtvssdqsnseeakkeeakkeeakksnsvdivltqspatlsvtpgdrvslscrasqsis
dylhwyqqkshesprllikyashsisgipsrfsgsgsgsdftlsinsvepedvgiyycqhghsfpwtfgggtkleikrggggsg
gggsggggsqiqlvqsgpelkkpgetvrisckasgyaftttgmqwvqempgkglkwigwintplwsakicrrlqgrfafslet
santaylqisnlkdedtatyfcvrsgngnydlayfaywgqgtlvtvsdqepkssdkthtsppspapellggssvflfppkpkdtl
misrtpevtcvvvdvshedpevkfnwyvdgvevhnaktkpreeqynstyrvvsvltvlhqdwlngkeykckvsnkalpap
iektiskakgqprepqvytlppsrdeltknqvsltclvkgfypsdiavewesngqpennykttppvldsdgsfflyskltvdksr
wqqgnvfscsvmhealhnhytqkslslspgk
NT
5B9 VH (includes the VH leader peptide) (SEQ ID NO: 563)
atggctgtcttggggctgctcttctgcctggtgacatttccaagctgtgtcctatcccaggtgcagctgaagca
gtcaggacctggcctagtgcagtcctcacagagcctgtccatcacctgcacagtctctggtttctcattaactacctatgctgtacact
gggttcgccagtctccaggaaagggtctggagtggctgggagtgatatggagtggtggaatcacagactataatgcagctttcatat
ccagactgagcatcaccaaggacgattccaagagccaagttttctttaaaatgaacagtctgcaacctaatgacacagccatttatta
ctgtgccagaaatgggggtgataactacccttattactatgctatggactactggggtcaaggaacctcagtcaccgtctcctca
5B9 VH missing the leader (SEQ ID NO: 564):
caggtgcagctgaagcagtcaggacctggcctagtgcagtcctcacagagcctgtccatcacctgcacagt
ctctggtttctcattaactacctatgctgtacactgggttcgccagtctccaggaaagggtctggagtggctgggagtgatatggagt
ggtggaatcacagactataatgcagctttcatatccagactgagcatcaccaaggacgattccaagagccaagttttctttaaaatga
acagtctgcaacctaatgacacagccatttattactgtgccagaaatgggggtgataactacccttattactatgctatggactactgg
ggtcaaggaacctcagtcaccgtctcctca
AA
5B9 VH (includes leader peptide) (SEQ ID NO: 565)
MAVLGLLFCLVTFPSCVLSQVQLKQSGPGLVQSSQSLSITCTVSGFSL
TTYAVHWVRQSPGKGLEWLGVIWSGGITDYNAAFISRLSITKDDSKSQVFFKMNS
LQPNDTAIYYCARNGGDNYPYYYAMDYWGQGTSVTVSS
5B9 VH no leader peptide (SEQ ID NO: 566)
QVQLKQSGPGLVQSSQSLSITCTVSGFSLTTYAVHWVRQSPGKGLE
WLGVIWSGGITDYNAAFISRLSITKDDSKSQVFFKMNSLQPNDTAIYYCARNGGDN
YPYYYAMDYWGQGTSVTVSS
NT
5B9 VL (SEQ ID NO: 567)
atgaggttctctgctcagcttctggggctgcttgtgctctggatccctggatccactgcagatattgtgatgacg
caggctgcattctccaatccagtcactcttggaacatcagcttccatctcctgcaggtctagtaagagtctcctacatagtaatggcatc
acttatttgtattggtatctgcagaagccaggccagtctcctcagctcctgatttatcagatgtccaaccttgcctcaggagtcccagac
aggttcagtagcagtgggtcaggaactgatttcacactgagaatcagcagagtggaggctgaggatgtgggtgtttattactgtgct
caaaatctagaacttccgctcacgttcggtgctgggaccaagctggagctgaaacgg
AA
5B9 VL (SEQ ID NO: 568)
MRFSAQLLGLLVLWIPGSTADIVMTQAAFSNPVTLGTSASISCRSSKS
LLHSNGITYLYWYLQKPGQSPQLLIYQMSNLASGVPDRFSSSGSGTDFTLRISRVEA
EDVGVYYCAQNLELPLTFGAGTKLELKR
NT
5B9 scFv (SEQ ID NO: 569)
aagcttgccgccatgaggttctctgctcagcttctggggctgcttgtgctctggatccctggatccactgcaga
tattgtgatgacgcaggctgcattctccaatccagtcactcttggaacatcagcttccatctcctgcaggtctagtaagagtctcctaca
tagtaatggcatcacttatttgtattggtatctgcagaagccaggccagtctcctcagctcctgatttatcagatgtccaaccttgcctca
ggagtcccagacaggttcagtagcagtgggtcaggaactgatttcacactgagaatcagcagagtggaggctgaggatgtgggtg
tttattactgtgctcaaaatctagaacttccgctcacgttcggtgctgggaccaagctggagctgaaacggggtggcggtggctcgg
gcggtggtgggtcgggtggcggcggatcgtcacaggtgcagctgaagcagtcaggacctggcctagtgcagtcctcacagagc
ctgtccatcacctgcacagtctctggtttctcattaactacctatgctgtacactgggttcgccagtctccaggaaagggtctggagtg
gctgggagtgatatggagtggtggaatcacagactataatgcagctttcatatccagactgagcatcaccaaggacgattccaaga
gccaagttttctttaaaatgaacagtctgcaacctaatgacacagccatttattactgtgccagaaatgggggtgataactacccttatt
actatgctatggactactggggtcaaggaacctcagtcaccgtctcctct
AA
5B9 scFv (SEQ ID NO: 570)
MRFSAQLLGLLVLWIPGSTADIVMTQAAFSNPVTLGTSASISCRSSKS
LLHSNGITYLYWYLQKPGQSPQLLIYQMSNLASGVPDRFSSSGSGTDFTLRISRVEA
EDVGVYYCAQNLELPLTFGAGTKLELKRGGGGSGGGGSGGGGSSQVQLKQSGPG
LVQSSQSLSITCTVSGFSLTTYAVHWVRQSPGKGLEWLGVIWSGGITDYNAAFISR
LSITKDDSKSQVFFKMNSLQPNDTAIYYCARNGGDNYPYYYAMDYWGQGTSVTV
SS
NT
5B9 scFv-hmtIgG1-hCD80 (SEQ ID NO: 571)
aagcttgccgccatgaggttctctgctcagcttctggggctgcttgtgctctggatccctggatccactgcaga
tattgtgatgacgcaggctgcattctccaatccagtcactcttggaacatcagcttccatctcctgcaggtctagtaagagtctcctaca
tagtaatggcatcacttatttgtattggtatctgcagaagccaggccagtctcctcagctcctgatttatcagatgtccaaccttgcctca
ggagtcccagacaggttcagtagcagtgggtcaggaactgatttcacactgagaatcagcagagtggaggctgaggatgtgggtg
tttattactgtgctcaaaatctagaacttccgctcacgttcggtgctgggaccaagctggagctgaaacggggtggcggtggctcgg
gcggtggtgggtcgggtggcggcggatcgtcacaggtgcagctgaagcagtcaggacctggcctagtgcagtcctcacagagc
ctgtccatcacctgcacagtctctggtttctcattaactacctatgctgtacactgggttcgccagtctccaggaaagggtctggagtg
gctgggagtgatatggagtggtggaatcacagactataatgcagctttcatatccagactgagcatcaccaaggacgattccaaga
gccaagttttctttaaaatgaacagtctgcaacctaatgacacagccatttattactgtgccagaaatgggggtgataactacccttatt
actatgctatggactactggggtcaaggaacctcagtcaccgtctcctctgatctggagcccaaatcttctgacaaaactcacacaag
cccaccgagcccagcacctgaactcctggggggatcgtcagtcttcctcttccccccaaaacccaaggacaccctcatgatctccc
ggacccctgaggtcacatgcgtggtggtggacgtgagccacgaagaccctgaggtcaagttcaactggtacgtggacggcgtgg
aggtgcataatgccaagacaaagccgcgggaggagcagtacaacagcacgtaccgtgtggtcagcgtcctcaccgtcctgcacc
aggactggctgaatggcaaggagtacaagtgcaaggtctccaacaaagccctcccagcccccatcgagaaaaccatctccaaag
ccaaagggcagccccgagaaccacaggtgtacaccctgcccccatcccgggatgagctgaccaagaaccaggtcagcctgacc
tgcctggtcaaaggcttctatcccagcgacatcgccgtggagtgggagagcaatgggcagccggagaacaactacaagaccac
gcctcccgtgctggactccgacggctccttcttcctctacagcaagctcaccgtggacaagagcaggtggcagcaggggaacgtc
ttctcatgctccgtgatgcatgaggctctgcacaaccactacacgcagaagagcctctccctgtctccgggtaaagcggatccttcg
aacctgctcccatcctgggccattaccttaatctcagtaaatggaatttttgtgatatgctgcctgacctactgctttgccccaagatgca
gagagagaaggaggaatgagagattgagaagggaaagtgtacgccctgtataaatcgatactcgag
AA
5B9 scFv-hmtIgG1-hCD80 (SEQ ID NO: 572)
MRFSAQLLGLLVLWIPGSTADIVMTQAAFSNPVTLGTSASISCRSSKS
LLHSNGITYLYWYLQKPGQSPQLLIYQMSNLASGVPDRFSSSGSGTDFTLRISRVEA
EDVGVYYCAQNLELPLTFGAGTKLELKRGGGGSGGGGSGGGGSSQVQLKQSGPG
LVQSSQSLSITCTVSGFSLTTYAVHWVRQSPGKGLEWLGVIWSGGITDYNAAFISR
LSITKDDSKSQVFFKMNSLQPNDTAIYYCARNGGDNYPYYYAMDYWGQGTSVTV
SSDLEPKSSDKTHTSPPSPAPELLGGSSVFLFPPKPKDTLMISRTPEVTCVVVDVSHE
DPEVKFNWYVDGVEVHNAKTKPREEQYNSTYRVVSVLTVLHQDWLNGKEYKCK
VSNKALPAPIEKTISKAKGQPREPQVYTLPPSRDELTKNQVSLTCLVKGFYPSDIAV
EWESNGQPENNYKTTPPVLDSDGSFFLYSKLTVDKSRWQQGNVFSCSVMHEALH
NHYTQKSLSLSPGKADPSNLLPSWAITLISVNGIFVICCLTYCFAPRCRERRRNERLR
RESVRPV
NT
2e12 scFv WTH CH2 CH3 (2e12 scFv-WthIgG-CD80) (SEQ ID NO: 573)
aagcttatggattttcaagtgcagattttcagcttcctgctaatcagtgcttcagtcataatgtccagaggagtcg
acattgtgctcacccaatctccagcttctttggctgtgtctctaggtcagagagccaccatctcctgcagagccagtgaaagtgttgaa
tattatgtcacaagtttaatgcagtggtaccaacagaaaccaggacagccacccaaactcctcatctctgctgcatccaacgtagaat
ctggggtccctgccaggtttagtggcagtgggtctgggacagacttcagcctcaacatccatcctgtggaggaggatgatattgcaa
tgtatttctgtcagcaaagtaggaaggttccttggacgttcggtggaggcaccaagctggaaatcaaacggggtggcggtggctcg
ggcggaggtgggtcgggtggcggcggatctcaggtgcagctgaaggagtcaggacctggcctggtggcgccctcacagagcc
tgtccatcacatgcaccgtctcagggttctcattaaccggctatggtgtaaactgggttcgccagcctccaggaaagggtctggagt
ggctgggaatgatatggggtgatggaagcacagactataattcagctctcaaatccagactgagcatcaccaaggacaactccaa
gagccaagttttcttaaaaatgaacagtctgcaaactgatgacacagccagatactactgtgccagagatggttatagtaactttcatt
actatgttatggactactggggtcaaggaacctcagtcaccgtctcctcagatctggagcccaaatcttgtgacaaaactcacacatg
cccaccgtgcccagcacctgaactcctggggggaccgtcagtcttcctcttccccccaaaacccaaggacaccctcatgatctccc
ggacccctgaggtcacatgcgtggtggtggacgtgagccacgaagaccctgaggtcaagttcaactggtacgtggacggcgtgg
aggtgcataatgccaagacaaagccgcgggaggagcagtacaacagcacgtaccgtgtggtcagcgtcctcaccgtcctgcacc
aggactggctgaatggcaaggagtacaagtgcaaggtctccaacaaagccctcccagcccccatcgagaaaaccatctccaaag
ccaaagggcagccccgagaaccacaggtgtacaccctgcccccatcccgggatgagctgaccaagaaccaggtcagcctgacc
tgcctggtcaaaggcttctatcccagcgacatcgccgtggagtgggagagcaatgggcagccggagaacaactacaagaccac
gcctcccgtgctggactccgacggctccttcttcctctacagcaagctcaccgtggacaagagcaggtggcagcaggggaacgtc
ttctcatgctccgtgatgcatgaggctctgcacaaccactacacgcagaagagcctctccctgtctccgggtaaagcggatccttcg
aacctgctcccatcctgggccattaccttaatctcagtaaatggaatttttgtgatatgctgcctgacctactgctttgccccaagatgca
gagagagaaggaggaatgagagattgagaagggaaagtgtacgccctgtataaatcgat
2e12 scFv WTH CH2 CH3 2e12 scFv-WthIgG-CD80 (SEQ ID NO: 574)
mdfqvqifsfllisasvimsrgvdivltqspaslavslgqratiscrasesveyyvtslmqwyqqkpgqp
pkllisaasnvesgvparfsgsgsgtdfslnihpveeddiamyfcqqsrkvpwtfgggtkleikrggggsggggsggggsqvq
lkesgpglvapsqslsitctvsgfsltgygvnwvrqppgkglewlgmiwgdgstdynsalksrlsitkdnsksqvflkmnslqt
ddtaryycardgysnfhyyvmdywgqgtsvtvssdlepkscdkthtcppcpapellggpsvflfppkpkdtlmisrtpevtc
vvvdvshedpevkfnwyvdgvevhnaktkpreeqynstyrvvsvltvlhqdwlngkeykckvsnkalpapiektiskakg
qprepqvytlppsrdeltknqvsltclvkgfypsdiavewesngqpennykttppvldsdgsfflyskltvdksrwqqgnvfsc
svmhealhnhytqkslslspgkadpsnllpswaitlisvngifviccltycfaprcrerrrnerlrresvrpv
NT
2H7-human IgE Fc (CH2—CH3—CH4) (SEQ ID NO: 575)
aagcttgccgccatggattttcaagtgcagattttcagcttcctgctaatcagtgcttcagtcataattgccagag
gacaaattgttctctcccagtctccagcaatcctgtctgcatctccaggggagaaggtcacaatgacttgcagggccagctcaagtg
taagttacatgcactggtaccagcagaagccaggatcctcccccaaaccctggatttatgccccatccaacctggcttctggagtcc
ctgctcgcttcagtggcagtgggtctgggacctcttactctctcacaatcagcagagtggaggctgaagatgctgccacttattactg
ccagcagtggagttttaacccacccacgttcggtgctgggaccaagctggagctgaaaggtggcggtggctcgggcggtggtgg
atctggaggaggtgggagctctcaggcttatctacagcagtctggggctgagctggtgaggcctggggcctcagtgaagatgtcct
gcaaggcttctggctacacatttaccagttacaatatgcactgggtaaagcagacacctagacagggcctggaatggattggagct
atttatccaggaaatggtgatacttcctacaatcagaagttcaagggcaaggccacactgactgtagacaaatcctccagcacagcc
tacatgcagctcagcagcctgacatctgaagactctgcggtctatttctgtgcaagagtggtgtactatagtaactcttactggtacttc
gatgtctggggcacagggaccacggtcaccgtctctgatcacgtctgctccagggacttcaccccgcccaccgtgaagatcttaca
gtcgtcctgcgacggcggcgggcacttccccccgaccatccagctcctgtgcctcgtctctgggtacaccccagggactatcaac
atcacctggctggaggacgggcaggtcatggacgtggacttgtccaccgcctctaccacgcaggagggtgagctggcctccaca
caaagcgagctcaccctcagccagaagcactggctgtcagaccgcacctacacctgccaggtcacctatcaaggtcacacctttg
aggacagcaccaagaagtgtgcagattccaacccgagaggggtgagcgcctacctaagccggcccagcccgttcgacctgttca
tccgcaagtcgcccacgatcacctgtctggtggtggacctggcacccagcaaggggaccgtgaacctgacctggtcccgggcca
gtgggaagcctgtgaaccactccaccagaaaggaggagaagcagcgcaatggcacgttaaccgtcacgtccaccctgccggtg
ggcacccgagactggatcgagggggagacctaccagtgcagggtgacccacccccacctgcccagggccctcatgcggtcca
cgaccaagaccagcggcccgcgtgctgccccggaagtctatgcgtttgcgacgccggagtggccggggagccgggacaagcg
caccctcgcctgcctgatccagaacttcatgcctgaggacatctcggtgcagtggctgcacaacgaggtgcagctcccggacgcc
cggcacagcacgacgcagccccgcaagaccaagggctccggcttcttcgtcttcagccgcctggaggtgaccagggccgaatg
ggagcagaaagatgagttcatctgccgtgcagtccatgaggcagcgagcccctcacagaccgtccagcgagcggtgtctgtaaat
cccggtaaatgataatctaga
AA
2H7 scFv IgE (CH2—CH3—CH4) (SEQ ID NO: 576)
mdfqvqifsfllisasviiargqivlsqspailsaspgekvtmtcrasssvsymhwyqqkpgsspkpwiy
apsnlasgvparfsgsgsgtsysltisrveaedaatyycqqwsfnpptfgagtklelkggggsggggsggggssqaylqqsgae
lvrpgasvkmsckasgytftsynmhwvkqtprqglewigaiypgngdtsynqkfkgkatltvdkssstaymqlssltsedsa
vyfcarvvyysnsywyfdvwgtgttvtvsdhvcsrdftpptvkilqsscdggghfpptiqllclvsgytpgtinitwledgqvm
dvdlstasttqegelastqseltlsqkhwlsdrtytcqvtyqghtfedstkkcadsnprgvsaylsrpspfdlfirksptitclvvdla
pskgtvnltwsrasgkpvnhstrkeekqrngtltvtstlpvgtrdwiegetyqcrvthphlpralmrsttktsgpraapevyafat
pewpgsrdkrtlacliqnfmpedisvqwlhnevqlpdarhsttqprktkgsgffvfsrlevtraeweqkdeficravheaasps
qtvqravsvnpgk
NT
2H7 scFv MH (SSS) MCH2WTCH3 (SEQ ID NO: 577)
aagcttgccgccatggattttcaagtgcagattttcagcttcctgctaatcagtgcttcagtcataattgccagag
gacaaattgttctctcccagtctccagcaatcctgtctgcatctccaggggagaaggtcacaatgacttgcagggccagctcaagtg
taagttacatgcactggtaccagcagaagccaggatcctcccccaaaccctggatttatgccccatccaacctggcttctggagtcc
ctgctcgcttcagtggcagtgggtctgggacctcttactctctcacaatcagcagagtggaggctgaagatgctgccacttattactg
ccagcagtggagttttaacccacccacgttcggtgctgggaccaagctggagctgaaagatggcggtggctcgggcggtggtgg
atctggaggaggtgggagctctcaggcttatctacagcagtctggggctgagctggtgaggcctggggcctcagtgaagatgtcct
gcaaggcttctggctacacatttaccagttacaatatgcactgggtaaagcagacacctagacagggcctggaatggattggagct
atttatccaggaaatggtgatacttcctacaatcagaagttcaagggcaaggccacactgactgtagacaaatcctccagcacagcc
tacatgcagctcagcagcctgacatctgaagactctgcggtctatttctgtgcaagagtggtgtactatagtaactcttactggtacttc
gatgtctggggcacagggaccacggtcaccgtctcttctgatcaggagcccaaatcttctgacaaaactcacacatccccaccgtc
cccagcacctgaactcctggggggatcgtcagtcttcctcttccccccaaaacccaaggacaccctcatgatctcccggacccctg
aggtcacatgcgtggtggtggacgtgagccacgaagaccctgaggtcaagttcaactggtacgtggacggcgtggaggtgcata
atgccaagacaaagccgcgggaggagcagtacaacagcacgtaccgtgtggtcagcgtcctcaccgtcctgcaccaggactgg
ctgaatggcaaggagtacaagtgcaaggtctccaacaaagccctcccagcccccatcgagaaaacaatctccaaagccaaaggg
cagccccgagaaccacaggtgtacaccctgcccccatcccgggatgagctgaccaagaaccaggtcagcctgacctgcctggtc
aaaggcttctatcccagcgacatcgccgtggagtgggagagcaatgggcagccggagaacaactacaagaccacgcctcccgt
gctggactccgacggctccttcttcctctacagcaagctcaccgtggacaagagcaggtggcagcaggggaacgtcttctcatgct
ccgtgatgcatgaggctctgcacaaccactacacgcagaagagcctctccctgtctccgggtaaatgatctaga
AA
2H7 scFv MH (SSS) MCH2WTCH3 (SEQ ID NO: 578)
mdfqvqifsfllisasviiargqivlsqspailsaspgekvtmtcrasssvsymhwyqqkpgsspkpwiy
apsnlasgvparfsgsgsgtsysltisrveaedaatyycqqwsfnpptfgagtklelkdgggsggggsggggssqaylqqsgae
lvrpgasvkmsckasgytftsynmhwvkqtprqglewigaiypgngdtsynqkfkgkatltvdkssstaymqlssltsedsa
vyfcarvvyysnsywyfdvwgtgttvtvssdqepkssdkthtsppspapellggssvflfppkpkdtlmisrtpevtcvvvdv
shedpevkfnwyvdgvevhnaktkpreeqynstyrvvsvltvlhqdwlngkeykckvsnkalpapiektiskakgqprep
qvytlppsrdeltknqvsltclvkgfypsdiavewesngqpennykttppvldsdgsfflyskltvdksrwqqgnvfscsvmh
ealhnhytqkslslspgk
NT
5B9 scFv MTHWTCH2CH3 (SEQ ID NO: 579)
aagcttgccgccatgaggttctctgctcagcttctggggctgcttgtgctctggatccctggatccactgcaga
tattgtgatgacgcaggctgcattctccaatccagtcactcttggaacatcagcttccatctcctgcaggtctagtaagagtctcctaca
tagtaatggcatcacttatttgtattggtatctgcagaagccaggccagtctcctcagctcctgatttatcagatgtccaaccttgcctca
ggagtcccagacaggttcagtagcagtgggtcaggaactgatttcacactgagaatcagcagagtggaggctgaggatgtgggtg
tttattactgtgctcaaaatctagaacttccgctcacgttcggtgctgggaccaagctggagctgaaacggggtggcggtggctcgg
gcggtggtgggtcgggtggcggcggatcgtcacaggtgcagctgaagcagtcaggacctggcctagtgcagtcctcacagagc
ctgtccatcacctgcacagtctctggtttctcattaactacctatgctgtacactgggttcgccagtctccaggaaagggtctggagtg
gctgggagtgatatggagtggtggaatcacagactataatgcagctttcatatccagactgagcatcaccaaggacgattccaaga
gccaagttttctttaaaatgaacagtctgcaacctaatgacacagccatttattactgtgccagaaatgggggtgataactacccttatt
actatgctatggactactggggtcaaggaacctcagtcaccgtctcctctgatcaggagcccaaatcttctgacaaaactcacacatc
cccaccgtccccagcacctgaactcctggggggaccgtcagtcttcctcttccccccaaaacccaaggacaccctcatgatctccc
ggacccctgaggtcacatgcgtggtggtggacgtgagccacgaagaccctgaggtcaagttcaactggtacgtggacggcgtgg
aggtgcataatgccaagacaaagccgcgggaggagcagtacaacagcacgtaccgtgtggtcagcgtcctcaccgtcctgcacc
aggactggctgaatggcaaggagtacaagtgcaaggtctccaacaaagccctcccagcccccatcgagaaaacaatctccaaag
ccaaagggcagccccgagaaccacaggtgtacaccctgcccccatcccgggatgagctgaccaagaaccaggtcagcctgacc
tgcctggtcaaaggcttctatcccagcgacatcgccgtggagtgggagagcaatgggcagccggagaacaactacaagaccac
gcctcccgtgctggactccgacggctccttcttcctctacagcaagctcaccgtggacaagagcaggtggcagcaggggaacgtc
ttctcatgctccgtgatgcatgaggctctgcacaaccactacacgcagaagagcctctccctgtctccgggtaaatgatctaga
AA
5B9 scFv MTHWTCH2CH3 (SEQ ID NO: 580)
MRFSAQLLGLLVLWIPGSTADIVMTQAAFSNPVTLGTSASISCRSSKS
LLHSNGITYLYWYLQKPGQSPQLLIYQMSNLASGVPDRFSSSGSGTDFTLRISRVEA
EDVGVYYCAQNLELPLTFGAGTKLELKRGGGGSGGGGSGGGGSSQVQLKQSGPG
LVQSSQSLSITCTVSGFSLTTYAVHWVRQSPGKGLEWLGVIWSGGITDYNAAFISR
LSITKDDSKSQVFFKMNSLQPNDTAIYYCARNGGDNYPYYYAMDYWGQGTSVTV
SSDQEPKSSDKTHTSPPSPAPELLGGPSVFLFPPKPKDTLMISRTPEVTCVVVDVSHE
DPEVKFNWYVDGVEVHNAKTKPREEQYNSTYRVVSVLTVLHQDWLNGKEYKCK
VSNKALPAPIEKTISKAKGQPREPQVYTLPPSRDELTKNQVSLTCLVKGFYPSDIAV
EWESNGQPENNYKTTPPVLDSDGSFFLYSKLTVDKSRWQQGNVFSCSVMHEALH
NHYTQKSLSLSPGK
Human IgG1 hinge mutations
2H7 scFv-MTH (CSS) WTCH2CH3 (SEQ ID NO: 581)
Nucleotide:
aagcttgccgccatggattttcaagtgcagattttcagcttcctgctaatcagtgcttcagtcataattgccagag
gacaaattgttctctcccagtctccagcaatcctgtctgcatctccaggggagaaggtcacaatgacttgcagggccagctcaagtg
taagttacatgcactggtaccagcagaagccaggatcctcccccaaaccctggatttatgccccatccaacctggcttctggagtcc
ctgctcgcttcagtggcagtgggtctgggacctcttactctctcacaatcagcagagtggaggctgaagatgctgccacttattactg
ccagcagtggagttttaacccacccacgttcggtgctgggaccaagctggagctgaaagatggcggtggctcgggcggtggtgg
atctggaggaggtgggagctctcaggcttatctacagcagtctggggctgagctggtgaggcctggggcctcagtgaagatgtcct
gcaaggcttctggctacacatttaccagttacaatatgcactgggtaaagcagacacctagacagggcctggaatggattggagct
atttatccaggaaatggtgatacttcctacaatcagaagttcaagggcaaggccacactgactgtagacaaatcctccagcacagcc
tacatgcagctcagcagcctgacatctgaagactctgcggtctatttctgtgcaagagtggtgtactatagtaactcttactggtacttc
gatgtctggggcacagggaccacggtcaccgtctcttctgatcaggagcccaaatcttgtgacaaaactcacacatccccaccgtc
cccagcacctgaactcctggggggaccgtcagtcttcctcttccccccaaaacccaaggacaccctcatgatctcccggacccctg
aggtcacatgcgtggtggtggacgtgagccacgaagaccctgaggtcaagttcaactggtacgtggacggcgtggaggtgcata
atgccaagacaaagccgcgggaggagcagtacaacagcacgtaccgtgtggtcagcgtcctcaccgtcctgcaccaggactgg
ctgaatggcaaggagtacaagtgcaaggtctccaacaaagccctcccagcccccatcgagaaaacaatctccaaagccaaaggg
cagccccgagaaccacaggtgtacaccctgcccccatcccgggatgagctgaccaagaaccaggtcagcctgacctgcctggtc
aaaggcttctatcccagcgacatcgccgtggagtgggagagcaatgggcagccggagaacaactacaagaccacgcctcccgt
gctggactccgacggctccttcttcctctacagcaagctcaccgtggacaagagcaggtggcagcaggggaacgtcttctcatgct
ccgtgatgcatgaggctctgcacaaccactacacgcagaagagcctctccctgtctccgggtaaatgatctaga
2H7 scFv-MTH (CSS) WTCH2CH3 protein (SEQ ID NO: 582):
mdfqvqifsfllisasviiargqivlsqspailsaspgekvtmtcrasssvsymhwyqqkpgsspkpwiy
apsnlasgvparfsgsgsgtsysltisrveaedaatyycqqwsfnpptfgagtklelkdgggsggggsggggssqaylqqsgae
lvrpgasvkmsckasgytftsynmhwvkqtprqglewigaiypgngdtsynqkfkgkatltvdkssstaymqlssltsedsa
vyfcarvvyysnsywyfdvwgtgttvtvssdqepkscdkthtsppspapellggpsvflfppkpkdtlmisrtpevtcvvvdv
shedpevkfnwyvdgvevhnaktkpreeqynstyrvvsvltvlhqdwlngkeykckvsnkalpapiektiskakgqprep
qvytlppsrdeltknqvsltclvkgfypsdiavewesngqpennykttppvldsdgsfflyskltvdksrwqqgnvfscsvmh
ealhnhytqkslslspgk
2H7 scFv-MTH (SCS) WTCH2CH3 (SEQ ID NO: 583):
Nucleotide:
aagcttgccgccatggattttcaagtgcagattttcagcttcctgctaatcagtgcttcagtcataattgccagag
gacaaattgttctctcccagtctccagcaatcctgtctgcatctccaggggagaaggtcacaatgacttgcagggccagctcaagtg
taagttacatgcactggtaccagcagaagccaggatcctcccccaaaccctggatttatgccccatccaacctggcttctggagtcc
ctgctcgcttcagtggcagtgggtctgggacctcttactctctcacaatcagcagagtggaggctgaagatgctgccacttattactg
ccagcagtggagttttaacccacccacgttcggtgctgggaccaagctggagctgaaagatggcggtggctcgggcggtggtgg
atctggaggaggtgggagctctcaggcttatctacagcagtctggggctgagctggtgaggcctggggcctcagtgaagatgtcct
gcaaggcttctggctacacatttaccagttacaatatgcactgggtaaagcagacacctagacagggcctggaatggattggagct
atttatccaggaaatggtgatacttcctacaatcagaagttcaagggcaaggccacactgactgtagacaaatcctccagcacagcc
tacatgcagctcagcagcctgacatctgaagactctgcggtctatttctgtgcaagagtggtgtactatagtaactcttactggtacttc
gatgtctggggcacagggaccacggtcaccgtctcttctgatcaggagcccaaatcttctgacaaaactcacacatgcccaccgtc
cccagcacctgaactcctggggggaccgtcagtcttcctcttccccccaaaacccaaggacaccctcatgatctcccggacccctg
aggtcacatgcgtggtggtggacgtgagccacgaagaccctgaggtcaagttcaactggtacgtggacggcgtggaggtgcata
atgccaagacaaagccgcgggaggagcagtacaacagcacgtaccgtgtggtcagcgtcctcaccgtcctgcaccaggactgg
ctgaatggcaaggagtacaagtgcaaggtctccaacaaagccctcccagcccccatcgagaaaacaatctccaaagccaaaggg
cagccccgagaaccacaggtgtacaccctgcccccatcccgggatgagctgaccaagaaccaggtcagcctgacctgcctggtc
aaaggcttctatcccagcgacatcgccgtggagtgggagagcaatgggcagccggagaacaactacaagaccacgcctcccgt
gctggactccgacggctccttcttcctctacagcaagctcaccgtggacaagagcaggtggcagcaggggaacgtcttctcatgct
ccgtgatgcatgaggctctgcacaaccactacacgcagaagagcctctccctgtctccgggtaaatgatctaga
2H7 scFv-MTH (SCS) WTCH2CH3 Protein (SEQ ID NO: 584):
mdfqvqifsfllisasviiargqivlsqspailsaspgekvtmtcrasssvsymhwyqqkpgsspkpwiy
apsnlasgvparfsgsgsgtsysltisrveaedaatyycqqwsfnpptfgagtklelkdgggsggggsggggssqaylqqsgae
lvrpgasvkmsckasgytftsynmhwvkqtprqglewigaiypgngdtsynqkfkgkatltvdkssstaymqlssltsedsa
vyfcarvvyysnsywyfdvwgtgttvtvssdqepkssdkthtcppspapellggpsvflfppkpkdtlmisrtpevtcvvvdv
shedpevkfnwyvdgvevhnaktkpreeqynstyrvvsvltvlhqdwlngkeykckvsnkalpapiektiskakgqprep
qvytlppsrdeltknqvsltclvkgfypsdiavewesngqpennykttppvldsdgsfflyskltvdksrwqqgnvfscsvmh
ealhnhytqkslslspgk
2H7 scFv-MTH (SSC) WTCH2CH3 (SEQ ID NO: 585):
Nucleotide:
aagcttgccgccatggattttcaagtgcagattttcagcttcctgctaatcagtgcttcagtcataattgccagag
gacaaattgttctctcccagtctccagcaatcctgtctgcatctccaggggagaaggtcacaatgacttgcagggccagctcaagtg
taagttacatgcactggtaccagcagaagccaggatcctcccccaaaccctggatttatgccccatccaacctggcttctggagtcc
ctgctcgcttcagtggcagtgggtctgggacctcttactctctcacaatcagcagagtggaggctgaagatgctgccacttattactg
ccagcagtggagttttaacccacccacgttcggtgctgggaccaagctggagctgaaagatggcggtggctcgggcggtggtgg
atctggaggaggtgggagctctcaggcttatctacagcagtctggggctgagctggtgaggcctggggcctcagtgaagatgtcct
gcaaggcttctggctacacatttaccagttacaatatgcactgggtaaagcagacacctagacagggcctggaatggattggagct
atttatccaggaaatggtgatacttcctacaatcagaagttcaagggcaaggccacactgactgtagacaaatcctccagcacagcc
tacatgcagctcagcagcctgacatctgaagactctgcggtctatttctgtgcaagagtggtgtactatagtaactcttactggtacttc
gatgtctggggcacagggaccacggtcaccgtctcttctgatcaggagcccaaatcttctgacaaaactcacacatccccaccgtg
cccagcacctgaactcctggggggaccgtcagtcttcctcttccccccaaaacccaaggacaccctcatgatctcccggacccctg
aggtcacatgcgtggtggtggacgtgagccacgaagaccctgaggtcaagttcaactggtacgtggacggcgtggaggtgcata
atgccaagacaaagccgcgggaggagcagtacaacagcacgtaccgtgtggtcagcgtcctcaccgtcctgcaccaggactgg
ctgaatggcaaggagtacaagtgcaaggtctccaacaaagccctcccagcccccatcgagaaaacaatctccaaagccaaaggg
cagccccgagaaccacaggtgtacaccctgcccccatcccgggatgagctgaccaagaaccaggtcagcctgacctgcctggtc
aaaggcttctatcccagcgacatcgccgtggagtgggagagcaatgggcagccggagaacaactacaagaccacgcctcccgt
gctggactccgacggctccttcttcctctacagcaagctcaccgtggacaagagcaggtggcagcaggggaacgtcttctcatgct
ccgtgatgcatgaggctctgcacaaccactacacgcagaagagcctctccctgtctccgggtaaatgatctaga
2H7 scFv-MTH (SSC) WTCH2CH3 Protein (SEQ ID NO: 586):
mdfqvqifsfllisasviiargqivlsqspailsaspgekvtmtcrasssvsymhwyqqkpgsspkpwiy
apsnlasgvparfsgsgsgtsysltisrveaedaatyycqqwsfnpptfgagtklelkdgggsggggsggggssqaylqqsgae
lvrpgasvkmsckasgytftsynmhwvkqtprqglewigaiypgngdtsynqkfkgkatltvdkssstaymqlssltsedsa
vyfcarvvyysnsywyfdvwgtgttvtvssdqepkssdkthtsppcpapellggpsvflfppkpkdtlmisrtpevtcvvvdv
shedpevkfnwyvdgvevhnaktkpreeqynstyrvvsvltvlhqdwlngkeykckvsnkalpapiektiskakgqprep
qvytlppsrdeltknqvsltclvkgfypsdiavewesngqpennykttppvldsdgsfflyskltvdksrwqqgnvfscsvmh
ealhnhytqkslslspgk
HIgGMHcys1 (SEQ ID NO: 587)
gtt gtt gat cag gag ccc aaa tct tct gac aaa act cac aca tg
HIgGMHcys2 (SEQ ID NO: 588)
gtt gtt gat cag gag ccc aaa tct tgt gac aaa act cac aca tct cca ccg tgc
HIgGMHcys3 (SEQ ID NO: 589)
gtt gtt gat cag gag ccc aaa tct tgt gac aaa act cac aca tgt cca ccg tcc cca gca
cct
NT
HuIgG1 MTCH3Y405 (SEQ ID NO: 590)
gggcagccccgagaaccacaggtgtacaccctgcccccatcccgggaggagatgaccaagaaccaggt
cagcctgacctgcctggtcaaaggcttctatcccagcgacatcgccgtggagtgggagagcaatgggcagccggagaacaacta
caagaccacgcctcccgtgctggactccgacggctccttctacctctatagcaagctcaccgtggacaagagcaggtggcagcag
gggaacgtcttctcatgctccgtgatgcatgaggctctgcacaaccactacacgcagaagagcctctccctgtccccgggtaaatga
AA
HuIgG1 MTCH3Y405 (SEQ ID NO: 591)
GQPREPQVYTLPPSREEMTKNQVSLTCLVKGFYPSDIAVEWESNGQ
PENNYKTTPPVLDSDGSFYLYSKLTVDKSRWQQGNVFSCSVMHEALHNHYTQKS
LSLSPGK
NT
HuIgG1 MTCH3A405 (SEQ ID NO: 592)
gggcagccccgagaaccacaggtgtacaccctgcccccatcccgggaggagatgaccaagaaccaggt
cagcctgacctgcctggtcaaaggcttctatcccagcgacatcgccgtggagtgggagagcaatgggcagccggagaacaacta
caagaccacgcctcccgtgctggactccgacggctccttcgccctctatagcaagctcaccgtggacaagagcaggtggcagca
ggggaacgtcttctcatgctccgtgatgcatgaggctctgcacaaccactacacgcagaagagcctctccctgtccccgggtaaat
ga
AA
HuIgG1 MTCH3A405 (SEQ ID NO: 593)
GQPREPQVYTLPPSREEMTKNQVSLTCLVKGFYPSDIAVEWESNGQ
PENNYKTTPPVLDSDGSFALYSKLTVDKSRWQQGNVFSCSVMHEALHNHYTQKS
LSLSPGK
NT
HuIgG1 MTCH3A407 (SEQ ID NO: 594)
Gggcagccccgagaaccacaggtgtacaccctgcccccatcccgggaggagatgaccaagaaccaggt
cagcctgacctgcctggtcaaaggcttctatcccagcgacatcgccgtggagtgggagagcaatgggcagccggagaacaacta
caagaccacgcctcccgtgctggactccgacggctccttcttcctcgccagcaagctcaccgtggacaagagcaggtggcagca
ggggaacgtcttctcatgctccgtgatgcatgaggctctgcacaaccactacacgcagaagagcctctccctgtccccgggtaaat
ga
AA
HuIgG1 MTCH3A407 (SEQ ID NO: 595)
GQPREPQVYTLPPSREEMTKNQVSLTCLVKGFYPSDIAVEWESNGQ
PENNYKTTPPVLDSDGSFFLASKLTVDKSRWQQGNVFSCSVMHEALHNHYTQKSL
SLSPGK
NT
HuIgG1 MTCH3Y405A407 (SEQ ID NO: 596)
gggcagccccgagaaccacaggtgtacaccctgcccccatcccgggaggagatgaccaagaaccaggt
cagcctgacctgcctggtcaaaggcttctatcccagcgacatcgccgtggagtgggagagcaatgggcagccggagaacaacta
caagaccacgcctcccgtgctggactccgacggctccttctacctcgccagcaagctcaccgtggacaagagcaggtggcagca
ggggaacgtcttctcatgctccgtgatgcatgaggctctgcacaaccactacacgcagaagagcctctccctgtccccgggtaaat
ga
AA
HuIgG1 MTCH3Y405A407 (SEQ ID NO: 597)
GQPREPQVYTLPPSREEMTKNQVSLTCLVKGFYPSDIAVEWESNGQ
PENNYKTTPPVLDSDGSFYLASKLTVDKSRWQQGNVFSCSVMHEALHNHYTQKS
LSLSPGK
NT
HuIgG1 MTCH3A405A407 (SEQ ID NO: 598)
gggcagccccgagaaccacaggtgtacaccctgcccccatcccgggaggagatgaccaagaaccaggt
cagcctgacctgcctggtcaaaggcttctatcccagcgacatcgccgtggagtgggagagcaatgggcagccggagaacaacta
caagaccacgcctcccgtgctggactccgacggctccttcgccctcgccagcaagctcaccgtggacaagagcaggtggcagc
aggggaacgtcttctcatgctccgtgatgcatgaggctctgcacaaccactacacgcagaagagcctctccctgtccccgggtaaa
tga
AA
HuIgG1 MTCH3A405A407 (SEQ ID NO: 599)
gqprepqvytlppsreemtknqvsltclvkgfypsdiavewesngqpennykttppvldsdgsfalask
ltvdksrwqqgnvfscsvmhealhnhytqkslslspgk
NT
2H7 scFv MTH (SSS) WTCH2MTCH3Y405 (SEQ ID NO: 600)
aagcttgccgccatggattttcaagtgcagattttcagcttcctgctaatcagtgcttcagtcataattgccagag
gacaaattgttctctcccagtctccagcaatcctgtctgcatctccaggggagaaggtcacaatgacttgcagggccagctcaagtg
taagttacatgcactggtaccagcagaagccaggatcctcccccaaaccctggatttatgccccatccaacctggcttctggagtcc
ctgctcgcttcagtggcagtgggtctgggacctcttactctctcacaatcagcagagtggaggctgaagatgctgccacttattactg
ccagcagtggagttttaacccacccacgttcggtgctgggaccaagctggagctgaaagatggcggtggctcgggcggtggtgg
atctggaggaggtgggagctctcaggcttatctacagcagtctggggctgagctggtgaggcctggggcctcagtgaagatgtcct
gcaaggcttctggctacacatttaccagttacaatatgcactgggtaaagcagacacctagacagggcctggaatggattggagct
atttatccaggaaatggtgatacttcctacaatcagaagttcaagggcaaggccacactgactgtagacaaatcctccagcacagcc
tacatgcagctcagcagcctgacatctgaagactctgcggtctatttctgtgcaagagtggtgtactatagtaactcttactggtacttc
gatgtctggggcacagggaccacggtcaccgtctcttctgatcaggagcccaaatcttctgacaaaactcacacatccccaccgtc
cccagcacctgaactcctggggggaccgtcagtcttcctcttccccccaaaacccaaggacaccctcatgatctcccggacccctg
aggtcacatgcgtggtggtggacgtgagccacgaagaccctgaggtcaagttcaactggtacgtggacggcgtggaggtgcata
atgccaagacaaagccgcgggaggagcagtacaacagcacgtaccgtgtggtcagcgtcctcaccgtcctgcaccaggactgg
ctgaatggcaaggagtacaagtgcaaggtctccaacaaagccctcccagcccccatcgagaaaacaatctccaaagccaaaggg
cagccccgagaaccacaggtgtacaccctgcccccatcccgggaggagatgaccaagaaccaggtcagcctgacctgcctggt
caaaggcttctatcccagcgacatcgccgtggagtgggagagcaatgggcagccggagaacaactacaagaccacgcctcccg
tgctggactccgacggctccttctacctctatagcaagctcaccgtggacaagagcaggtggcagcaggggaacgtcttctcatgc
tccgtgatgcatgaggctctgcacaaccactacacgcagaagagcctctccctgtccccgggtaaatgatctaga
AA
2H7 scFv MTH (SSS) WTCH2MTCH3Y405 (SEQ ID NO: 601)
mdfqvqifsfllisasviiargqivlsqspailsaspgekvtmtcrasssvsymhwyqqkpgsspkpwiy
apsnlasgvparfsgsgsgtsysltisrveaedaatyycqqwsfnpptfgagtklelkdgggsggggsggggssqaylqqsgae
lvrpgasvkmsckasgytftsynmhwvkqtprqglewigaiypgngdtsynqkfkgkatltvdkssstaymqlssltsedsa
vyfcarvvyysnsywyfdvwgtgttvtvssdqepkssdkthtsppspapellggpsvflfppkpkdtlmisrtpevtcvvvdv
shedpevkfnwyvdgvevhnaktkpreeqynstyrvvsvltvlhqdwlngkeykckvsnkalpapiektiskakgqprep
qvytlppsreemtknqvsltclvkgfypsdiavewesngqpennykttppvldsdgsfylyskltvdksrwqqgnvfscsvm
healhnhytqkslslspgk
NT
2H7 scFv MTH (SSS) WTCH2MTCH3A405 (SEQ ID NO: 602)
aagcttgccgccatggattttcaagtgcagattttcagcttcctgctaatcagtgcttcagtcataattgccagag
gacaaattgttctctcccagtctccagcaatcctgtctgcatctccaggggagaaggtcacaatgacttgcagggccagctcaagtg
taagttacatgcactggtaccagcagaagccaggatcctcccccaaaccctggatttatgccccatccaacctggcttctggagtcc
ctgctcgcttcagtggcagtgggtctgggacctcttactctctcacaatcagcagagtggaggctgaagatgctgccacttattactg
ccagcagtggagttttaacccacccacgttcggtgctgggaccaagctggagctgaaagatggcggtggctcgggcggtggtgg
atctggaggaggtgggagctctcaggcttatctacagcagtctggggctgagctggtgaggcctggggcctcagtgaagatgtcct
gcaaggcttctggctacacatttaccagttacaatatgcactgggtaaagcagacacctagacagggcctggaatggattggagct
atttatccaggaaatggtgatacttcctacaatcagaagttcaagggcaaggccacactgactgtagacaaatcctccagcacagcc
tacatgcagctcagcagcctgacatctgaagactctgcggtctatttctgtgcaagagtggtgtactatagtaactcttactggtacttc
gatgtctggggcacagggaccacggtcaccgtctcttctgatcaggagcccaaatcttctgacaaaactcacacatccccaccgtc
cccagcacctgaactcctggggggaccgtcagtcttcctcttccccccaaaacccaaggacaccctcatgatctcccggacccctg
aggtcacatgcgtggtggtggacgtgagccacgaagaccctgaggtcaagttcaactggtacgtggacggcgtggaggtgcata
atgccaagacaaagccgcgggaggagcagtacaacagcacgtaccgtgtggtcagcgtcctcaccgtcctgcaccaggactgg
ctgaatggcaaggagtacaagtgcaaggtctccaacaaagccctcccagcccccatcgagaaaacaatctccaaagccaaaggg
cagccccgagaaccacaggtgtacaccctgcccccatcccgggaggagatgaccaagaaccaggtcagcctgacctgcctggt
caaaggcttctatcccagcgacatcgccgtggagtgggagagcaatgggcagccggagaacaactacaagaccacgcctcccg
tgctggactccgacggctccttcgccctctatagcaagctcaccgtggacaagagcaggtggcagcaggggaacgtcttctcatg
ctccgtgatgcatgaggctctgcacaaccactacacgcagaagagcctctccctgtccccgggtaaatga
AA
2H7 scFv MTH (SSS) WTCH2MTCH3A405 (SEQ ID NO: 603)
mdfqvqifsfllisasviiargqivlsqspailsaspgekvtmtcrasssvsymhwyqqkpgsspkpwiy
apsnlasgvparfsgsgsgtsysltisrveaedaatyycqqwsfnpptfgagtklelkdgggsggggsggggssqaylqqsgae
lvrpgasvkmsckasgytftsynmhwvkqtprqglewigaiypgngdtsynqkfkgkatltvdkssstaymqlssltsedsa
vyfcarvvyysnsywyfdvwgtgttvtvssdqepkssdkthtsppspapellggpsvflfppkpkdtlmisrtpevtcvvvdv
shedpevkfnwyvdgvevhnaktkpreeqynstyrvvsvltvlhqdwlngkeykckvsnkalpapiektiskakgqprep
qvytlppsreemtknqvsltclvkgfypsdiavewesngqpennykttppvldsdgsfalyskltvdksrwqqgnvfscsvm
healhnhytqkslslspgk
NT
2H7 scFv MTH (SSS) WTCH2MTCH3A407 (SEQ ID NO: 604)
aagcttgccgccatggattttcaagtgcagattttcagcttcctgctaatcagtgcttcagtcataattgccagag
gacaaattgttctctcccagtctccagcaatcctgtctgcatctccaggggagaaggtcacaatgacttgcagggccagctcaagtg
taagttacatgcactggtaccagcagaagccaggatcctcccccaaaccctggatttatgccccatccaacctggcttctggagtcc
ctgctcgcttcagtggcagtgggtctgggacctcttactctctcacaatcagcagagtggaggctgaagatgctgccacttattactg
ccagcagtggagttttaacccacccacgttcggtgctgggaccaagctggagctgaaagatggcggtggctcgggcggtggtgg
atctggaggaggtgggagctctcaggcttatctacagcagtctggggctgagctggtgaggcctggggcctcagtgaagatgtcct
gcaaggcttctggctacacatttaccagttacaatatgcactgggtaaagcagacacctagacagggcctggaatggattggagct
atttatccaggaaatggtgatacttcctacaatcagaagttcaagggcaaggccacactgactgtagacaaatcctccagcacagcc
tacatgcagctcagcagcctgacatctgaagactctgcggtctatttctgtgcaagagtggtgtactatagtaactcttactggtacttc
gatgtctggggcacagggaccacggtcaccgtctcttctgatcaggagcccaaatcttctgacaaaactcacacatccccaccgtc
cccagcacctgaactcctggggggaccgtcagtcttcctcttccccccaaaacccaaggacaccctcatgatctcccggacccctg
aggtcacatgcgtggtggtggacgtgagccacgaagaccctgaggtcaagttcaactggtacgtggacggcgtggaggtgcata
atgccaagacaaagccgcgggaggagcagtacaacagcacgtaccgtgtggtcagcgtcctcaccgtcctgcaccaggactgg
ctgaatggcaaggagtacaagtgcaaggtctccaacaaagccctcccagcccccatcgagaaaacaatctccaaagccaaaggg
cagccccgagaaccacaggtgtacaccctgcccccatcccgggaggagatgaccaagaaccaggtcagcctgacctgcctggt
caaaggcttctatcccagcgacatcgccgtggagtgggagagcaatgggcagccggagaacaactacaagaccacgcctcccg
tgctggactccgacggctccttcttcctcgccagcaagctcaccgtggacaagagcaggtggcagcaggggaacgtcttctcatg
ctccgtgatgcatgaggctctgcacaaccactacacgcagaagagcctctccctgtccccgggtaaatga
AA
2H7 scFv MTH (SSS) WTCH2MTCH3A407 (SEQ ID NO: 605)
mdfqvqifsfllisasviiargqivlsqspailsaspgekvtmtcrasssvsymhwyqqkpgsspkpwiy
apsnlasgvparfsgsgsgtsysltisrveaedaatyycqqwsfnpptfgagtklelkdgggsggggsggggssqaylqqsgae
lvrpgasvkmsckasgytftsynmhwvkqtprqglewigaiypgngdtsynqkfkgkatltvdkssstaymqlssltsedsa
vyfcarvvyysnsywyfdvwgtgttvtvssdqepkssdkthtsppspapellggpsvflfppkpkdtlmisrtpevtcvvvdv
shedpevkfnwyvdgvevhnaktkpreeqynstyrvvsvltvlhqdwlngkeykckvsnkalpapiektiskakgqprep
qvytlppsreemtknqvsltclvkgfypsdiavewesngqpennykttppvldsdgsfflaskltvdksrwqqgnvfscsvm
healhnhytqkslslspgk
NT
2H7 scFv MTH (SSS) WTCH2MTCH3Y405A407 (SEQ ID NO: 606)
aagcttgccgccatggattttcaagtgcagattttcagcttcctgctaatcagtgcttcagtcataattgccagag
gacaaattgttctctcccagtctccagcaatcctgtctgcatctccaggggagaaggtcacaatgacttgcagggccagctcaagtg
taagttacatgcactggtaccagcagaagccaggatcctcccccaaaccctggatttatgccccatccaacctggcttctggagtcc
ctgctcgcttcagtggcagtgggtctgggacctcttactctctcacaatcagcagagtggaggctgaagatgctgccacttattactg
ccagcagtggagttttaacccacccacgttcggtgctgggaccaagctggagctgaaagatggcggtggctcgggcggtggtgg
atctggaggaggtgggagctctcaggcttatctacagcagtctggggctgagctggtgaggcctggggcctcagtgaagatgtcct
gcaaggcttctggctacacatttaccagttacaatatgcactgggtaaagcagacacctagacagggcctggaatggattggagct
atttatccaggaaatggtgatacttcctacaatcagaagttcaagggcaaggccacactgactgtagacaaatcctccagcacagcc
tacatgcagctcagcagcctgacatctgaagactctgcggtctatttctgtgcaagagtggtgtactatagtaactcttactggtacttc
gatgtctggggcacagggaccacggtcaccgtctcttctgatcaggagcccaaatcttctgacaaaactcacacatccccaccgtc
cccagcacctgaactcctggggggaccgtcagtcttcctcttccccccaaaacccaaggacaccctcatgatctcccggacccctg
aggtcacatgcgtggtggtggacgtgagccacgaagaccctgaggtcaagttcaactggtacgtggacggcgtggaggtgcata
atgccaagacaaagccgcgggaggagcagtacaacagcacgtaccgtgtggtcagcgtcctcaccgtcctgcaccaggactgg
ctgaatggcaaggagtacaagtgcaaggtctccaacaaagccctcccagcccccatcgagaaaacaatctccaaagccaaaggg
cagccccgagaaccacaggtgtacaccctgcccccatcccgggaggagatgaccaagaaccaggtcagcctgacctgcctggt
caaaggcttctatcccagcgacatcgccgtggagtgggagagcaatgggcagccggagaacaactacaagaccacgcctcccg
tgctggactccgacggctccttctacctcgccagcaagctcaccgtggacaagagcaggtggcagcaggggaacgtcttctcatg
ctccgtgatgcatgaggctctgcacaaccactacacgcagaagagcctctccctgtccccgggtaaatga
AA
2H7 scFv MTH (SSS) WTCH2MTCH3Y405A407 (SEQ ID NO: 607)
mdfqvqifsfllisasviiargqivlsqspailsaspgekvtmtcrasssvsymhwyqqkpgsspkpwiy
apsnlasgvparfsgsgsgtsysltisrveaedaatyycqqwsfnpptfgagtklelkdgggsggggsggggssqaylqqsgae
lvrpgasvkmsckasgytftsynmhwvkqtprqglewigaiypgngdtsynqkfkgkatltvdkssstaymqlssltsedsa
vyfcarvvyysnsywyfdvwgtgttvtvssdqepkssdkthtsppspapellggpsvflfppkpkdtlmisrtpevtcvvvdv
shedpevkfnwyvdgvevhnaktkpreeqynstyrvvsvltvlhqdwlngkeykckvsnkalpapiektiskakgqprep
qvytlppsreemtknqvsltclvkgfypsdiavewesngqpennykttppvldsdgsfylaskltvdksrwqqgnvfscsvm
healhnhytqkslslspgk
NT
2H7 scFv MTH (SSS) WTCH2MTCH3A405A407 (SEQ ID NO: 608)
aagcttgccgccatggattttcaagtgcagattttcagcttcctgctaatcagtgcttcagtcataattgccagag
gacaaattgttctctcccagtctccagcaatcctgtctgcatctccaggggagaaggtcacaatgacttgcagggccagctcaagtg
taagttacatgcactggtaccagcagaagccaggatcctcccccaaaccctggatttatgccccatccaacctggcttctggagtcc
ctgctcgcttcagtggcagtgggtctgggacctcttactctctcacaatcagcagagtggaggctgaagatgctgccacttattactg
ccagcagtggagttttaacccacccacgttcggtgctgggaccaagctggagctgaaagatggcggtggctcgggcggtggtgg
atctggaggaggtgggagctctcaggcttatctacagcagtctggggctgagctggtgaggcctggggcctcagtgaagatgtcct
gcaaggcttctggctacacatttaccagttacaatatgcactgggtaaagcagacacctagacagggcctggaatggattggagct
atttatccaggaaatggtgatacttcctacaatcagaagttcaagggcaaggccacactgactgtagacaaatcctccagcacagcc
tacatgcagctcagcagcctgacatctgaagactctgcggtctatttctgtgcaagagtggtgtactatagtaactcttactggtacttc
gatgtctggggcacagggaccacggtcaccgtctcttctgatcaggagcccaaatcttctgacaaaactcacacatccccaccgtc
cccagcacctgaactcctggggggaccgtcagtcttcctcttccccccaaaacccaaggacaccctcatgatctcccggacccctg
aggtcacatgcgtggtggtggacgtgagccacgaagaccctgaggtcaagttcaactggtacgtggacggcgtggaggtgcata
atgccaagacaaagccgcgggaggagcagtacaacagcacgtaccgtgtggtcagcgtcctcaccgtcctgcaccaggactgg
ctgaatggcaaggagtacaagtgcaaggtctccaacaaagccctcccagcccccatcgagaaaacaatctccaaagccaaaggg
cagccccgagaaccacaggtgtacaccctgcccccatcccgggaggagatgaccaagaaccaggtcagcctgacctgcctggt
caaaggcttctatcccagcgacatcgccgtggagtgggagagcaatgggcagccggagaacaactacaagaccacgcctcccg
tgctggactccgacggctccttcgccctcgccagcaagctcaccgtggacaagagcaggtggcagcaggggaacgtcttctcatg
ctccgtgatgcatgaggctctgcacaaccactacacgcagaagagcctctccctgtccccgggtaaatga
AA
2H7 scFv MTH (SSS) WTCH2MTCH3A405A407 (SEQ ID NO: 609)
mdfqvqifsfllisasviiargqivlsqspailsaspgekvtmtcrasssvsymhwyqqkpgsspkpwiy
apsnlasgvparfsgsgsgtsysltisrveaedaatyycqqwsfnpptfgagtklelkdgggsggggsggggssqaylqqsgae
lvrpgasvkmsckasgytftsynmhwvkqtprqglewigaiypgngdtsynqkfkgkatltvdkssstaymqlssltsedsa
vyfcarvvyysnsywyfdvwgtgttvtvssdqepkssdkthtsppspapellggpsvflfppkpkdtlmisrtpevtcvvvdv
shedpevkfnwyvdgvevhnaktkpreeqynstyrvvsvltvlhqdwlngkeykckvsnkalpapiektiskakgqprep
qvytlppsreemtknqvsltclvkgfypsdiavewesngqpennykttppvldsdgsfalaskltvdksrwqqgnvfscsvm
healhnhytqkslslspgk
NT
2H7 scFv MTH (SCC) WTCH2CH3 (SEQ ID NO: 610)
aagcttgccgccatggattttcaagtgcagattttcagcttcctgctaatcagtgcttcagtcataattgccagag
gacaaattgttctctcccagtctccagcaatcctgtctgcatctccaggggagaaggtcacaatgacttgcagggccagctcaagtg
taagttacatgcactggtaccagcagaagccaggatcctcccccaaaccctggatttatgccccatccaacctggcttctggagtcc
ctgctcgcttcagtggcagtgggtctgggacctcttactctctcacaatcagcagagtggaggctgaagatgctgccacttattactg
ccagcagtggagttttaacccacccacgttcggtgctgggaccaagctggagctgaaagatggcggtggctcgggcggtggtgg
atctggaggaggtgggagctctcaggcttatctacagcagtctggggctgagctggtgaggcctggggcctcagtgaagatgtcct
gcaaggcttctggctacacatttaccagttacaatatgcactgggtaaagcagacacctagacagggcctggaatggattggagct
atttatccaggaaatggtgatacttcctacaatcagaagttcaagggcaaggccacactgactgtagacaaatcctccagcacagcc
tacatgcagctcagcagcctgacatctgaagactctgcggtctatttctgtgcaagagtggtgtactatagtaactcttactggtacttc
gatgtctggggcacagggaccacggtcaccgtctcttctgatcaggagcccaaatcttctgacaaaactcacacatgcccaccgtg
cccagcacctgaactcctggggggaccgtcagtcttcctcttccccccaaaacccaaggacaccctcatgatctcccggacccctg
aggtcacatgcgtggtggtggacgtgagccacgaagaccctgaggtcaagttcaactggtacgtggacggcgtggaggtgcata
atgccaagacaaagccgcgggaggagcagtacaacagcacgtaccgtgtggtcagcgtcctcaccgtcctgcaccaggactgg
ctgaatggcaaggagtacaagtgcaaggtctccaacaaagccctcccagcccccatcgagaaaacaatctccaaagccaaaggg
cagccccgagaaccacaggtgtacaccctgcccccatcccgggatgagctgaccaagaaccaggtcagcctgacctgcctggtc
aaaggcttctatcccagcgacatcgccgtggagtgggagagcaatgggcagccggagaacaactacaagaccacgcctcccgt
gctggactccgacggctccttcttcctctacagcaagctcaccgtggacaagagcaggtggcagcaggggaacgtcttctcatgct
ccgtgatgcatgaggctctgcacaaccactacacgcagaagagcctctccctgtctccgggtaaatgatctaga
AA
2H7 scFv MTH (SCC) WTCH2CH3 (SEQ ID NO: 611)
mdfqvqifsfllisasviiargqivlsqspailsaspgekvtmtcrasssvsymhwyqqkpgsspkpwiy
apsnlasgvparfsgsgsgtsysltisrveaedaatyycqqwsfnpptfgagtklelkdgggsggggsggggssqaylqqsgae
lvrpgasvkmsckasgytftsynmhwvkqtprqglewigaiypgngdtsynqkfkgkatltvdkssstaymqlssltsedsa
vyfcarvvyysnsywyfdvwgtgttvtvssdqepkssdkthtcppcpapellggpsvflfppkpkdtlmisrtpevtcvvvdv
shedpevkfnwyvdgvevhnaktkpreeqynstyrvvsvltvlhqdwlngkeykckvsnkalpapiektiskakgqprep
qvytlppsrdeltknqvsltclvkgfypsdiavewesngqpennykttppvldsdgsfflyskltvdksrwqqgnvfscsvmh
ealhnhytqkslslspgk
NT
2H7 scFv MTH (CSC) WTCH2CH3 (SEQ ID NO: 612)
aagcttgccgccatggattttcaagtgcagattttcagcttcctgctaatcagtgcttcagtcataattgccagag
gacaaattgttctctcccagtctccagcaatcctgtctgcatctccaggggagaaggtcacaatgacttgcagggccagctcaagtg
taagttacatgcactggtaccagcagaagccaggatcctcccccaaaccctggatttatgccccatccaacctggcttctggagtcc
ctgctcgcttcagtggcagtgggtctgggacctcttactctctcacaatcagcagagtggaggctgaagatgctgccacttattactg
ccagcagtggagttttaacccacccacgttcggtgctgggaccaagctggagctgaaagatggcggtggctcgggcggtggtgg
atctggaggaggtgggagctctcaggcttatctacagcagtctggggctgagctggtgaggcctggggcctcagtgaagatgtcct
gcaaggcttctggctacacatttaccagttacaatatgcactgggtaaagcagacacctagacagggcctggaatggattggagct
atttatccaggaaatggtgatacttcctacaatcagaagttcaagggcaaggccacactgactgtagacaaatcctccagcacagcc
tacatgcagctcagcagcctgacatctgaagactctgcggtctatttctgtgcaagagtggtgtactatagtaactcttactggtacttc
gatgtctggggcacagggaccacggtcaccgtctcttctgatcaggagcccaaatcttgtgacaaaactcacacatctccaccgtg
cccagcacctgaactcctggggggaccgtcagtcttcctcttccccccaaaacccaaggacaccctcatgatctcccggacccctg
aggtcacatgcgtggtggtggacgtgagccacgaagaccctgaggtcaagttcaactggtacgtggacggcgtggaggtgcata
atgccaagacaaagccgcgggaggagcagtacaacagcacgtaccgtgtggtcagcgtcctcaccgtcctgcaccaggactgg
ctgaatggcaaggagtacaagtgcaaggtctccaacaaagccctcccagcccccatcgagaaaacaatctccaaagccaaaggg
cagccccgagaaccacaggtgtacaccctgcccccatcccgggatgagctgaccaagaaccaggtcagcctgacctgcctggtc
aaaggcttctatcccagcgacatcgccgtggagtgggagagcaatgggcagccggagaacaactacaagaccacgcctcccgt
gctggactccgacggctccttcttcctctacagcaagctcaccgtggacaagagcaggtggcagcaggggaacgtcttctcatgct
ccgtgatgcatgaggctctgcacaaccactacacgcagaagagcctctccctgtctccgggtaaatgatctaga
AA
2H7 scFv MTH (CSC) WTCH2CH3 (SEQ ID NO: 613)
mdfqvqifsfllisasviiargqivlsqspailsaspgekvtmtcrasssvsymhwyqqkpgsspkpwiy
apsnlasgvparfsgsgsgtsysltisrveaedaatyycqqwsfnpptfgagtklelkdgggsggggsggggssqaylqqsgae
lvrpgasvkmsckasgytftsynmhwvkqtprqglewigaiypgngdtsynqkfkgkatltvdkssstaymqlssltsedsa
vyfcarvvyysnsywyfdvwgtgttvtvssdqepkscdkthtsppcpapellggpsvflfppkpkdtlmisrtpevtcvvvdv
shedpevkfnwyvdgvevhnaktkpreeqynstyrvvsvltvlhqdwlngkeykckvsnkalpapiektiskakgqprep
qvytlppsrdeltknqvsltclvkgfypsdiavewesngqpennykttppvldsdgsfflyskltvdksrwqqgnvfscsvmh
ealhnhytqkslslspgk
NT
2H7 scFv MTH (CCS) WTCH2CH3 (SEQ ID NO: 614)
aagcttgccgccatggattttcaagtgcagattttcagcttcctgctaatcagtgcttcagtcataattgccagag
gacaaattgttctctcccagtctccagcaatcctgtctgcatctccaggggagaaggtcacaatgacttgcagggccagctcaagtg
taagttacatgcactggtaccagcagaagccaggatcctcccccaaaccctggatttatgccccatccaacctggcttctggagtcc
ctgctcgcttcagtggcagtgggtctgggacctcttactctctcacaatcagcagagtggaggctgaagatgctgccacttattactg
ccagcagtggagttttaacccacccacgttcggtgctgggaccaagctggagctgaaagatggcggtggctcgggcggtggtgg
atctggaggaggtgggagctctcaggcttatctacagcagtctggggctgagctggtgaggcctggggcctcagtgaagatgtcct
gcaaggcttctggctacacatttaccagttacaatatgcactgggtaaagcagacacctagacagggcctggaatggattggagct
atttatccaggaaatggtgatacttcctacaatcagaagttcaagggcaaggccacactgactgtagacaaatcctccagcacagcc
tacatgcagctcagcagcctgacatctgaagactctgcggtctatttctgtgcaagagtggtgtactatagtaactcttactggtacttc
gatgtctggggcacagggaccacggtcaccgtctcttctgatcaggagcccaaatcttgtgacaaaactcacacatgtccaccgtc
cccagcacctgaactcctggggggaccgtcagtcttcctcttccccccaaaacccaaggacaccctcatgatctcccggacccctg
aggtcacatgcgtggtggtggacgtgagccacgaagaccctgaggtcaagttcaactggtacgtggacggcgtggaggtgcata
atgccaagacaaagccgcgggaggagcagtacaacagcacgtaccgtgtggtcagcgtcctcaccgtcctgcaccaggactgg
ctgaatggcaaggagtacaagtgcaaggtctccaacaaagccctcccagcccccatcgagaaaacaatctccaaagccaaaggg
cagccccgagaaccacaggtgtacaccctgcccccatcccgggatgagctgaccaagaaccaggtcagcctgacctgcctggtc
aaaggcttctatcccagcgacatcgccgtggagtgggagagcaatgggcagccggagaacaactacaagaccacgcctcccgt
gctggactccgacggctccttcttcctctacagcaagctcaccgtggacaagagcaggtggcagcaggggaacgtcttctcatgct
ccgtgatgcatgaggctctgcacaaccactacacgcagaagagcctctccctgtctccgggtaaatgatctaga
AA
2H7 scFv MTH (CCS) WTCH2CH3 (SEQ ID NO: 615)
mdfqvqifsfllisasviiargqivlsqspailsaspgekvtmtcrasssvsymhwyqqkpgsspkpwiy
apsnlasgvparfsgsgsgtsysltisrveaedaatyycqqwsfnpptfgagtklelkdgggsggggsggggssqaylqqsgae
lvrpgasvkmsckasgytftsynmhwvkqtprqglewigaiypgngdtsynqkfkgkatltvdkssstaymqlssltsedsa
vyfcarvvyysnsywyfdvwgtgttvtvssdqepkscdkthtcppspapellggpsvflfppkpkdtlmisrtpevtcvvvdv
shedpevkfnwyvdgvevhnaktkpreeqynstyrvvsvltvlhqdwlngkeykckvsnkalpapiektiskakgqprep
qvytlppsrdeltknqvsltclvkgfypsdiavewesngqpennykttppvldsdgsfflyskltvdksrwqqgnvfscsvmh
ealhnhytqkslslspgk
NT
HuIgAHIgA-T4-ORF (SEQ ID NO: 616)
tgatcagccagttccctcaactccacctaccccatctccctcaactccacctaccccatctccctcatgctgcc
acccccgactgtcactgcaccgaccggccctcgaggacctgctcttaggttcagaagcgatcctcacgtgcacactgaccggcct
gagagatgcctcaggtgtcaccttcacctggacgccctcaagtgggaagagcgctgttcaaggaccacctgaccgtgacctctgt
ggctgctacagcgtgtccagtgtcctgccgggctgtgccgagccatggaaccatgggaagaccttcacttgcactgctgcctaccc
cgagtccaagaccccgctaaccgccaccctctcaaaatccggaaacacattccggcccgaggtccacctgctgccgccgccgtc
ggaggagctggccctgaacgagctggtgacgctgacgtgcctggcacgtggcttcagccccaaggatgtgctggttcgctggct
gcaggggtcacaggagctgccccgcgagaagtacctgacttgggcatcccggcaggagcccagccagggcaccaccaccttc
gctgtgaccagcatactgcgcgtggcagccgaggactggaagaagggggacaccttctcctgcatggtgggccacgaggccct
gccgctggccttcacacagaagaccatcgaccgcttggcgggtaaacccacccatgtcaatgtgtctgttgtcatggcggaggtgg
acgcggatccttcgaac
AA
HuIgAHIgA-T4-ORF (SEQ ID NO: 617)
Dqpvpstpptpspstpptpspscchprlslhrpaledlllgseailtctltglrdasgvtftwtpssgksavqg
ppdrdlcgcysvssvlpgcaepwnhgktftctaaypesktpltatlsksgntfrpevhllpppseelalnelvtltclargfspkdvl
vrwlqgsqelprekyltwasrqepsqgtttfavtsilrvaaedwkkgdtfscmvghealplaftqktidrlagkpthvnvsvvm
aevdadpsn
NT
HuIgAHIgA-T4-ORF (SEQ ID NO: 618)
tgatcagccagttccctcaactccacctaccccatctccctcaactccacctaccccatctccctcatgctgcc
acccccgactgtcactgcaccgaccggccctcgaggacctgctcttaggttcagaagcgatcctcacgtgcacactgaccggcct
gagagatgcctcaggtgtcaccttcacctggacgccctcaagtgggaagagcgctgttcaaggaccacctgaccgtgacctctgt
ggctgctacagcgtgtccagtgtcctgccgggctgtgccgagccatggaaccatgggaagaccttcacttgcactgctgcctaccc
cgagtccaagaccccgctaaccgccaccctctcaaaatccggaaacacattccggcccgaggtccacctgctgccgccgccgtc
ggaggagctggccctgaacgagctggtgacgctgacgtgcctggcacgtggcttcagccccaaggatgtgctggttcgctggct
gcaggggtcacaggagctgccccgcgagaagtacctgacttgggcatcccggcaggagcccagccagggcaccaccaccttc
gctgtgaccagcatactgcgcgtggcagccgaggactggaagaagggggacaccttctcctgcatggtgggccacgaggccct
gccgctggccttcacacagaagaccatcgaccgcttggcgggtaaacccacccatgtcaatgtgtctgttgtcatggcggaggtgg
acgcggatccttcgaac
AA
HuIgAHIgA-T4-ORF (SEQ ID NO: 619)
dqpvpstpptpspstpptpspscchprlslhrpaledlllgseailtctltglrdasgvtftwtpssgksavqg
ppdrdlcgcysvssvlpgcaepwnhgktftctaaypesktpltatlsksgntfrpevhllpppseelalnelvtltclargfspkdvl
vrwlqgsqelprekyltwasrqepsqgtttfavtsilrvaaedwkkgdtfscmvghealplaftqktidrlagkpthvnvsvvm
aevdadpsn
NT
1D8-IgAH IgA-T4-CD80 (SEQ ID NO: 620)
aagcttatggattttcaagtgcagattttcagcttcctgctaatcagtgcttcagtcataatgtccagaggagtcg
acattgtgctcactcagtctccaacaaccatagctgcatctccaggggagaaggtcaccatcacctgccgtgccagctccagtgtaa
gttacatgtactggtaccagcagaagtcaggcgcctcccctaaactctggatttatgacacatccaagctggcttctggagttccaaa
tcgcttcagtggcagtgggtctgggacctcttattctctcgcaatcaacaccatggagactgaagatgctgccacttattactgtcagc
agtggagtagtactccgctcacgttcgggtctgggaccaagctggagatcaaacggggtggcggtggctcgggcggtggtgggt
cgggtggcggcggatctcaggtgcagctgaaggaggcaggacctggcctggtgcaaccgacacagaccctgtccctcacatgc
actgtctctgggttctcattaaccagcgatggtgtacactggattcgacagcctccaggaaagggtctggaatggatgggaataatat
attatgatggaggcacagattataattcagcaattaaatccagactgagcatcagcagggacacctccaagagccaagttttcttaaa
aatcaacagtctgcaaactgatgacacagccatgtattactgtgccagaatccactttgattactggggccaaggagtcatggtcaca
gtctcctctgatcagccagttccctcaactccacctaccccatctccctcaactccacctaccccatctccctcatgctgccacccccg
actgtcactgcaccgaccggccctcgaggacctgctcttaggttcagaagcgatcctcacgtgcacactgaccggcctgagagat
gcctcaggtgtcaccttcacctggacgccctcaagtgggaagagcgctgttcaaggaccacctgaccgtgacctctgtggctgcta
cagcgtgtccagtgtcctgccgggctgtgccgagccatggaaccatgggaagaccttcacttgcactgctgcctaccccgagtcca
agaccccgctaaccgccaccctctcaaaatccggaaacacattccggcccgaggtccacctgctgccgccgccgtcggaggag
ctggccctgaacgagctggtgacgctgacgtgcctggcacgtggcttcagccccaaggatgtgctggttcgctggctgcaggggt
cacaggagctgccccgcgagaagtacctgacttgggcatcccggcaggagcccagccagggcaccaccaccttcgctgtgacc
agcatactgcgcgtggcagccgaggactggaagaagggggacaccttctcctgcatggtgggccacgaggccctgccgctggc
cttcacacagaagaccatcgaccgcttggcgggtaaacccacccatgtcaatgtgtctgttgtcatggcggaggtggacgcggatc
cttcgaacaacctgctcccatcctgggccattaccttaatctcagtaaatggaatttttgtgatatgctgcctgacctactgctttgcccc
aagatgcagagagagaaggaggaatgagagattgagaagggaaagtgtacgccctgtataaatcgatac
AA
1D8 scFv IgAH IgA-T4-CD80 (SEQ ID NO: 621)
mdfqvqifsfllisasvimsrgvdivltqspttiaaspgekvtitcrasssvsymywyqqksgaspklwiy
dtsklasgvpnrfsgsgsgtsyslaintmetedaatyycqqwsstpltfgsgtkleikrggggsggggsggggsqvqlkeagpg
lvqptqtlsltctvsgfsltsdgvhwirqppgkglewmgiiyydggtdynsaiksrlsisrdtsksqvflkinslqtddtamyyca
rihfdywgqgvmvtvssdqpvpstpptpspstpptpspscchprlslhrpaledlllgseailtctltglrdasgvtftwtpssgks
avqgppdrdlcgcysvssvlpgcaepwnhgktftctaaypesktpltatlsksgntfrpevhllpppseelalnelvtltclargfs
pkdvlvrwlqgsqelprekyltwasrqepsqgtttfavtsilrvaaedwkkgdtfscmvghealplaftqktidrlagkpthvnv
svvmaevdadpsnnllpswaitlisvngifviccltycfaprcrerrrnerlrresvrpv
NT
human IgE Fc (CH2—CH3—CH4) ORF (SEQ ID NO: 622):
tgatcacgtctgctccagggacttcaccccgcccaccgtgaagatcttacagtcgtcctgcgacggcggcg
ggcacttccccccgaccatccagctcctgtgcctcgtctctgggtacaccccagggactatcaacatcacctggctggaggacgg
gcaggtcatggacgtggacttgtccaccgcctctaccacgcaggagggtgagctggcctccacacaaagcgagctcaccctcag
ccagaagcactggctgtcagaccgcacctacacctgccaggtcacctatcaaggtcacacctttgaggacagcaccaagaagtgt
gcagattccaacccgagaggggtgagcgcctacctaagccggcccagcccgttcgacctgttcatccgcaagtcgcccacgatc
acctgtctggtggtggacctggcacccagcaaggggaccgtgaacctgacctggtcccgggccagtgggaagcctgtgaacca
ctccaccagaaaggaggagaagcagcgcaatggcacgttaaccgtcacgtccaccctgccggtgggcacccgagactggatcg
agggggagacctaccagtgcagggtgacccacccccacctgcccagggccctcatgcggtccacgaccaagaccagcggccc
gcgtgctgccccggaagtctatgcgtttgcgacgccggagtggccggggagccgggacaagcgcaccctcgcctgcctgatcc
agaacttcatgcctgaggacatctcggtgcagtggctgcacaacgaggtgcagctcccggacgcccggcacagcacgacgcag
ccccgcaagaccaagggctccggcttcttcgtcttcagccgcctggaggtgaccagggccgaatgggagcagaaagatgagttc
atctgccgtgcagtccatgaggcagcgagcccctcacagaccgtccagcgagcggtgtctgtaaatcccggtaaagcggatcctt
cgaa
AA
human IgE Fc (CH2—CH3—CH4) ORF (SEQ ID NO: 623):
dhvcsrdftpptvkilqsscdggghfpptiqllclvsgytpgtinitwledgqvmdvdlstasttqegelast
qseltlsqkhwlsdrtytcqvtyqghtfedstkkcadsnprgvsaylsrpspfdlfirksptitclvvdlapskgtvnltwsrasgk
pvnhstrkeekqrngtltvtstlpvgtrdwiegetyqcrvthphlpralmrsttktsgpraapevyafatpewpgsrdkrtlacliq
nfmpedisvqwlhnevqlpdarhsttqprktkgsgffvfsrlevtraeweqkdeficravheaaspsqtvqravsvnpgkadps
NT
1D8 scFv-human IgE Fc (CH2—CH3—CH4)-CD80 (SEQ ID NO: 624)
aagcttatggattttcaagtgcagattttcagcttcctgctaatcagtgcttcagtcataatgtccagaggagtcg
acattgtgctcactcagtctccaacaaccatagctgcatctccaggggagaaggtcaccatcacctgccgtgccagctccagtgtaa
gttacatgtactggtaccagcagaagtcaggcgcctcccctaaactctggatttatgacacatccaagctggcttctggagttccaaa
tcgcttcagtggcagtgggtctgggacctcttattctctcgcaatcaacaccatggagactgaagatgctgccacttattactgtcagc
agtggagtagtactccgctcacgttcgggtctgggaccaagctggagatcaaacggggtggcggtggctcgggcggtggtgggt
cgggtggcggcggatctcaggtgcagctgaaggaggcaggacctggcctggtgcaaccgacacagaccctgtccctcacatgc
actgtctctgggttctcattaaccagcgatggtgtacactggattcgacagcctccaggaaagggtctggaatggatgggaataatat
attatgatggaggcacagattataattcagcaattaaatccagactgagcatcagcagggacacctccaagagccaagttttcttaaa
aatcaacagtctgcaaactgatgacacagccatgtattactgtgccagaatccactttgattactggggccaaggagtcatggtcaca
gtctcctctgatcacgtctgctccagggacttcaccccgcccaccgtgaagatcttacagtcgtcctgcgacggcggcgggcacttc
cccccgaccatccagctcctgtgcctcgtctctgggtacaccccagggactatcaacatcacctggctggaggacgggcaggtca
tggacgtggacttgtccaccgcctctaccacgcaggagggtgagctggcctccacacaaagcgagctcaccctcagccagaagc
actggctgtcagaccgcacctacacctgccaggtcacctatcaaggtcacacctttgaggacagcaccaagaagtgtgcagattcc
aacccgagaggggtgagcgcctacctaagccggcccagcccgttcgacctgttcatccgcaagtcgcccacgatcacctgtctgg
tggtggacctggcacccagcaaggggaccgtgaacctgacctggtcccgggccagtgggaagcctgtgaaccactccaccaga
aaggaggagaagcagcgcaatggcacgttaaccgtcacgtccaccctgccggtgggcacccgagactggatcgagggggaga
cctaccagtgcagggtgacccacccccacctgcccagggccctcatgcggtccacgaccaagaccagcggcccgcgtgctgcc
ccggaagtctatgcgtttgcgacgccggagtggccggggagccgggacaagcgcaccctcgcctgcctgatccagaacttcatg
cctgaggacatctcggtgcagtggctgcacaacgaggtgcagctcccggacgcccggcacagcacgacgcagccccgcaaga
ccaagggctccggcttcttcgtcttcagccgcctggaggtgaccagggccgaatgggagcagaaagatgagttcatctgccgtgc
agtccatgaggcagcgagcccctcacagaccgtccagcgagcggtgtctgtaaatcccggtaaagcggatccttcgaagctccca
tcctgggccattaccttaatctcagtaaatggaatttttgtgatatgctgcctgacctactgctttgccccaagatgcagagagagaag
gaggaatgagagattgagaagggaaagtgtacgccctgtataaatcgata
AA 1D8-scFv-human IgE Fc (CH2—CH3—CH4)-CD80 (SEQ ID NO: 625)
mdfqvqifsfllisasvimsrgvdivltqspttiaaspgekvtitcrasssvsymywyqqksgaspklwiy
dtsklasgvpnrfsgsgsgtsyslaintmetedaatyycqqwsstpltfgsgtkleikrggggsggggsggggsqvqlkeagpg
lvqptqtlsltctvsgfsltsdgvhwirqppgkglewmgiiyydggtdynsaiksrlsisrdtsksqvflkinslqtddtamyyca
rihfdywgqgvmvtvssdhvcsrdftpptvkilqsscdggghfpptiqllclvsgytpgtinitwledgqvmdvdlstasttqe
gelastqseltlsqkhwlsdrtytcqvtyqghtfedstkkcadsnprgvsaylsrpspfdlfirksptitclvvdlapskgtvnltws
rasgkpvnhstrkeekqrngtltvtstlpvgtrdwiegetyqcrvthphlpralmrsttktsgpraapevyafatpewpgsrdkrt
lacliqnfmpedisvqwlhnevqlpdarhsttqprktkgsgffvfsrlevtraeweqkdeficravheaaspsqtvqravsvnp
gkadpsklpswaitlisvngifviccltycfaprcrerrrnerlrresvrpv
NT
5B9-IgAH IgA-T4-CD80 (SEQ ID NO: 626)
aagcttgccgccatgaggttctctgctcagcttctggggctgcttgtgctctggatccctggatccactgcaga
tattgtgatgacgcaggctgcattctccaatccagtcactcttggaacatcagcttccatctcctgcaggtctagtaagagtctcctaca
tagtaatggcatcacttatttgtattggtatctgcagaagccaggccagtctcctcagctcctgatttatcagatgtccaaccttgcctca
ggagtcccagacaggttcagtagcagtgggtcaggaactgatttcacactgagaatcagcagagtggaggctgaggatgtgggtg
tttattactgtgctcaaaatctagaacttccgctcacgttcggtgctgggaccaagctggagctgaaacggggtggcggtggctcgg
gcggtggtgggtcgggtggcggcggatcgtcacaggtgcagctgaagcagtcaggacctggcctagtgcagtcctcacagagc
ctgtccatcacctgcacagtctctggtttctcattaactacctatgctgtacactgggttcgccagtctccaggaaagggtctggagtg
gctgggagtgatatggagtggtggaatcacagactataatgcagctttcatatccagactgagcatcaccaaggacgattccaaga
gccaagttttctttaaaatgaacagtctgcaacctaatgacacagccatttattactgtgccagaaatgggggtgataactacccttatt
actatgctatggactactggggtcaaggaacctcagtcaccgtctcctctgatcagccagttccctcaactccacctaccccatctcc
ctcaactccacctaccccatctccctcatgctgccacccccgactgtcactgcaccgaccggccctcgaggacctgctcttaggttc
agaagcgatcctcacgtgcacactgaccggcctgagagatgcctcaggtgtcaccttcacctggacgccctcaagtgggaagag
cgctgttcaaggaccacctgaccgtgacctctgtggctgctacagcgtgtccagtgtcctgccgggctgtgccgagccatggaacc
atgggaagaccttcacttgcactgctgcctaccccgagtccaagaccccgctaaccgccaccctctcaaaatccggaaacacattc
cggcccgaggtccacctgctgccgccgccgtcggaggagctggccctgaacgagctggtgacgctgacgtgcctggcacgtgg
cttcagccccaaggatgtgctggttcgctggctgcaggggtcacaggagctgccccgcgagaagtacctgacttgggcatcccgg
caggagcccagccagggcaccaccaccttcgctgtgaccagcatactgcgcgtggcagccgaggactggaagaagggggaca
ccttctcctgcatggtgggccacgaggccctgccgctggccttcacacagaagaccatcgaccgcttggcgggtaaacccaccca
tgtcaatgtgtctgttgtcatggcggaggtggacgcggatccttcgaacaacctgctcccatcctgggccattaccttaatctcagtaa
atggaatttttgtgatatgctgcctgacctactgctttgccccaagatgcagagagagaaggaggaatgagagattgagaagggaa
agtgtacgccctgtataaatcgatac
AA
5B9-IgAH IgA-T4-CD80 (SEQ ID NO: 627)
mrfsaqllgllvlwipgstadivmtqaafsnpvtlgtsasiscrssksllhsngitylywylqkpgqspqlli
yqmsnlasgvpdrfsssgsgtdftlrisrveaedvgvyycaqnlelpltfgagtklelkrggggsggggsggggssqvqlkqsg
pglvqssqslsitctvsgfslttyavhwvrqspgkglewlgviwsggitdynaafisrlsitkddsksqvffkmnslqpndtaiy
ycarnggdnypyyyamdywgqgtsvtvssdqpvpstpptpspstpptpspscchprlslhrpaledlllgseailtctltglrda
sgvtftwtpssgksavqgppdrdlcgcysvssvlpgcaepwnhgktftctaaypesktpltatlsksgntfrpevhllpppseel
alnelvtltclargfspkdvlvrwlqgsqelprekyltwasrqepsqgtttfavtsilrvaaedwkkgdtfscmvghealplaftqk
tidrlagkpthvnvsvvmaevdadpsnnllpswaitlisvngifviccltycfaprcrerrrnerlrresvrpv
NT
5B9-scFv-human IgE Fc (CH2—CH3—CH4)-CD80 (SEQ ID NO: 628)
aagcttgccgccatgaggttctctgctcagcttctggggctgcttgtgctctggatccctggatccactgcaga
tattgtgatgacgcaggctgcattctccaatccagtcactcttggaacatcagcttccatctcctgcaggtctagtaagagtctcctaca
tagtaatggcatcacttatttgtattggtatctgcagaagccaggccagtctcctcagctcctgatttatcagatgtccaaccttgcctca
ggagtcccagacaggttcagtagcagtgggtcaggaactgatttcacactgagaatcagcagagtggaggctgaggatgtgggtg
tttattactgtgctcaaaatctagaacttccgctcacgttcggtgctgggaccaagctggagctgaaacggggtggcggtggctcgg
gcggtggtgggtcgggtggcggcggatcgtcacaggtgcagctgaagcagtcaggacctggcctagtgcagtcctcacagagc
ctgtccatcacctgcacagtctctggtttctcattaactacctatgctgtacactgggttcgccagtctccaggaaagggtctggagtg
gctgggagtgatatggagtggtggaatcacagactataatgcagctttcatatccagactgagcatcaccaaggacgattccaaga
gccaagttttctttaaaatgaacagtctgcaacctaatgacacagccatttattactgtgccagaaatgggggtgataactacccttatt
actatgctatggactactggggtcaaggaacctcagtcaccgtctcctctgatcacgtctgctccagggacttcaccccgcccaccg
tgaagatcttacagtcgtcctgcgacggcggcgggcacttccccccgaccatccagctcctgtgcctcgtctctgggtacacccca
gggactatcaacatcacctggctggaggacgggcaggtcatggacgtggacttgtccaccgcctctaccacgcaggagggtgag
ctggcctccacacaaagcgagctcaccctcagccagaagcactggctgtcagaccgcacctacacctgccaggtcacctatcaag
gtcacacctttgaggacagcaccaagaagtgtgcagattccaacccgagaggggtgagcgcctacctaagccggcccagcccgt
tcgacctgttcatccgcaagtcgcccacgatcacctgtctggtggtggacctggcacccagcaaggggaccgtgaacctgacctg
gtcccgggccagtgggaagcctgtgaaccactccaccagaaaggaggagaagcagcgcaatggcacgttaaccgtcacgtcca
ccctgccggtgggcacccgagactggatcgagggggagacctaccagtgcagggtgacccacccccacctgcccagggccct
catgcggtccacgaccaagaccagcggcccgcgtgctgccccggaagtctatgcgtttgcgacgccggagtggccggggagcc
gggacaagcgcaccctcgcctgcctgatccagaacttcatgcctgaggacatctcggtgcagtggctgcacaacgaggtgcagct
cccggacgcccggcacagcacgacgcagccccgcaagaccaagggctccggcttcttcgtcttcagccgcctggaggtgacca
gggccgaatgggagcagaaagatgagttcatctgccgtgcagtccatgaggcagcgagcccctcacagaccgtccagcgagcg
gtgtctgtaaatcccggtaaagcggatccttcgaagctcccatcctgggccattaccttaatctcagtaaatggaatttttgtgatatgct
gcctgacctactgctttgccccaagatgcagagagagaaggaggaatgagagattgagaagggaaagtgtacgccctgtataaat
cgata
AA
5B9-scFv-human IgE Fc (CH2—CH3—CH4)-CD80 (SEQ ID NO: 629)
[sequence omitted]
NT
2e12-scFv-IgAH IgA-T4-CD80 (SEQ ID NO: 630)
aagcttatggattttcaagtgcagattttcagcttcctgctaatcagtgcttcagtcataatgtccagaggagtcg
acattgtgctcacccaatctccagcttctttggctgtgtctctaggtcagagagccaccatctcctgcagagccagtgaaagtgttgaa
tattatgtcacaagtttaatgcagtggtaccaacagaaaccaggacagccacccaaactcctcatctctgctgcatccaacgtagaat
ctggggtccctgccaggtttagtggcagtgggtctgggacagacttcagcctcaacatccatcctgtggaggaggatgatattgcaa
tgtatttctgtcagcaaagtaggaaggttccttggacgttcggtggaggcaccaagctggaaatcaaacggggtggcggtggctcg
ggcggaggtgggtcgggtggcggcggatctcaggtgcagctgaaggagtcaggacctggcctggtggcgccctcacagagcc
tgtccatcacatgcaccgtctcagggttctcattaaccggctatggtgtaaactgggttcgccagcctccaggaaagggtctggagt
ggctgggaatgatatggggtgatggaagcacagactataattcagctctcaaatccagactgagcatcaccaaggacaactccaa
gagccaagttttcttaaaaatgaacagtctgcaaactgatgacacagccagatactactgtgccagagatggttatagtaactttcatt
actatgttatggactactggggtcaaggaacctcagtcaccgtctcctcagatcagccagttccctcaactccacctaccccatctcc
ctcaactccacctaccccatctccctcatgctgccacccccgactgtcactgcaccgaccggccctcgaggacctgctcttaggttc
agaagcgatcctcacgtgcacactgaccggcctgagagatgcctcaggtgtcaccttcacctggacgccctcaagtgggaagag
cgctgttcaaggaccacctgaccgtgacctctgtggctgctacagcgtgtccagtgtcctgccgggctgtgccgagccatggaacc
atgggaagaccttcacttgcactgctgcctaccccgagtccaagaccccgctaaccgccaccctctcaaaatccggaaacacattc
cggcccgaggtccacctgctgccgccgccgtcggaggagctggccctgaacgagctggtgacgctgacgtgcctggcacgtgg
cttcagccccaaggatgtgctggttcgctggctgcaggggtcacaggagctgccccgcgagaagtacctgacttgggcatcccgg
caggagcccagccagggcaccaccaccttcgctgtgaccagcatactgcgcgtggcagccgaggactggaagaagggggaca
ccttctcctgcatggtgggccacgaggccctgccgctggccttcacacagaagaccatcgaccgcttggcgggtaaacccaccca
tgtcaatgtgtctgttgtcatggcggaggtggacgcggatccttcgaacaacctgctcccatcctgggccattaccttaatctcagtaa
atggaatttttgtgatatgctgcctgacctactgctttgccccaagatgcagagagagaaggaggaatgagagattgagaagggaa
agtgtacgccctgtataaatcgatac
AA
2e12-scFv-IgAH IgA-T4-CD80 (SEQ ID NO: 631)
mdfqvqifsfllisasvimsrgvdivltqspaslavslgqratiscrasesveyyvtslmqwyqqkpgqp
pkllisaasnvesgvparfsgsgsgtdfslnihpveeddiamyfcqqsrkvpwtfgggtkleikrggggsggggsggggsqvq
lkesgpglvapsqslsitctvsgfsltgygvnwvrqppgkglewlgmiwgdgstdynsalksrlsitkdnsksqvflkmnslqt
ddtaryycardgysnfhyyvmdywgqgtsvtvssdqpvpstpptpspstpptpspscchprlslhrpaledlllgseailtctltg
lrdasgvtftwtpssgksavqgppdrdlcgcysvssvlpgcaepwnhgktftctaaypesktpltatlsksgntfrpevhllppps
eelalnelvtltclargfspkdvlvrwlqgsqelprekyltwasrqepsqgtttfavtsilrvaaedwkkgdtfscmvghealplaf
tqktidrlagkpthvnvsvvmaevdadpsnnllpswaitlisvngifviccltycfaprcrerrrnerlrresvrpv
NT
2e12-scFv-human IgE Fc (CH2—CH3—CH4)-CD80 (SEQ ID NO: 632)
aagcttatggattttcaagtgcagattttcagcttcctgctaatcagtgcttcagtcataatgtccagaggagtcg
acattgtgctcacccaatctccagcttctttggctgtgtctctaggtcagagagccaccatctcctgcagagccagtgaaagtgttgaa
tattatgtcacaagtttaatgcagtggtaccaacagaaaccaggacagccacccaaactcctcatctctgctgcatccaacgtagaat
ctggggtccctgccaggtttagtggcagtgggtctgggacagacttcagcctcaacatccatcctgtggaggaggatgatattgcaa
tgtatttctgtcagcaaagtaggaaggttccttggacgttcggtggaggcaccaagctggaaatcaaacggggtggcggtggctcg
ggcggaggtgggtcgggtggcggcggatctcaggtgcagctgaaggagtcaggacctggcctggtggcgccctcacagagcc
tgtccatcacatgcaccgtctcagggttctcattaaccggctatggtgtaaactgggttcgccagcctccaggaaagggtctggagt
ggctgggaatgatatggggtgatggaagcacagactataattcagctctcaaatccagactgagcatcaccaaggacaactccaa
gagccaagttttcttaaaaatgaacagtctgcaaactgatgacacagccagatactactgtgccagagatggttatagtaactttcatt
actatgttatggactactggggtcaaggaacctcagtcaccgtctcctcagatcacgtctgctccagggacttcaccccgcccaccg
tgaagatcttacagtcgtcctgcgacggcggcgggcacttccccccgaccatccagctcctgtgcctcgtctctgggtacacccca
gggactatcaacatcacctggctggaggacgggcaggtcatggacgtggacttgtccaccgcctctaccacgcaggagggtgag
ctggcctccacacaaagcgagctcaccctcagccagaagcactggctgtcagaccgcacctacacctgccaggtcacctatcaag
gtcacacctttgaggacagcaccaagaagtgtgcagattccaacccgagaggggtgagcgcctacctaagccggcccagcccgt
tcgacctgttcatccgcaagtcgcccacgatcacctgtctggtggtggacctggcacccagcaaggggaccgtgaacctgacctg
gtcccgggccagtgggaagcctgtgaaccactccaccagaaaggaggagaagcagcgcaatggcacgttaaccgtcacgtcca
ccctgccggtgggcacccgagactggatcgagggggagacctaccagtgcagggtgacccacccccacctgcccagggccct
catgcggtccacgaccaagaccagcggcccgcgtgctgccccggaagtctatgcgtttgcgacgccggagtggccggggagcc
gggacaagcgcaccctcgcctgcctgatccagaacttcatgcctgaggacatctcggtgcagtggctgcacaacgaggtgcagct
cccggacgcccggcacagcacgacgcagccccgcaagaccaagggctccggcttcttcgtcttcagccgcctggaggtgacca
gggccgaatgggagcagaaagatgagttcatctgccgtgcagtccatgaggcagcgagcccctcacagaccgtccagcgagcg
gtgtctgtaaatcccggtaaagcggatccttcgaagctcccatcctgggccattaccttaatctcagtaaatggaatttttgtgatatgct
gcctgacctactgctttgccccaagatgcagagagagaaggaggaatgagagattgagaagggaaagtgtacgccctgtataaat
cgata
AA
2e12-scFv-human IgE Fc (CH2—CH3—CH4)-CD80 (SEQ ID NO: 633)
mdfqvqifsfllisasvimsrgvdivltqspaslavslgqratiscrasesveyyvtslmqwyqqkpgqp
pkllisaasnvesgvparfsgsgsgtdfslnihpveeddiamyfcqqsrkvpwtfgggtkleikrggggsggggsggggsqvq
lkesgpglvapsqslsitctvsgfsltgygvnwvrqppgkglewlgmiwgdgstdynsalksrlsitkdnsksqvflkmnslqt
ddtaryycardgysnfhyyvmdywgqgtsvtvssdhvcsrdftpptvkilqsscdggghfpptiqllclvsgytpgtinitwle
dgqvmdvdlstasttqegelastqseltlsqkhwlsdrtytcqvtyqghtfedstkkcadsnprgvsaylsrpspfdlfirksptitc
lvvdlapskgtvnltwsrasgkpvnhstrkeekqrngtltvtstlpvgtrdwiegetyqcrvthphlpralmrsttktsgpraape
vyafatpewpgsrdkrtlacliqnfmpedisvqwlhnevqlpdarhsttqprktkgsgffvfsrlevtraeweqkdeficravhe
aaspsqtvqravsvnpgkadpsklpswaitlisvngifviccltycfaprcrerrrnerlrresvrpv
NT
500A2 scFv (SEQ ID NO: 634)
atgttgtatacatctcagctccttgggcttttactcttctggatttcagcctccagaagtgacatagtgctgactca
gactccagccactctgtctctaattcctggagaaagagtcacaatgacctgtaagaccagtcagaatattggcacaatcttacactgg
tatcaccaaaaaccaaaggaggctccaagggctctcatcaagtatgcttcgcagtccattcctgggatcccctccagattcagtggc
agtggttcggaaacagatttcactctcagcatcaataacctggagcctgatgatatcggaatttattactgtcaacaaagtagaagctg
gcctgtcacgttcggtcctggcaccaagctggagataaaacggggtggcggtggctcgggcggaggtgggtcgggtggcggcg
gatctcaggtcaagctgcagcagtccggttctgaactagggaaacctggggcctcagtgaaactgtcctgcaagacttcaggctac
atattcacagatcactatatttcttgggtgaaacagaagcctggagaaagcctgcagtggataggaaatgtttatggtggaaatggtg
gtacaagctacaatcaaaaattccagggcaaggccacactgactgtagataaaatctctagcacagcctacatggaactcagcagc
ctgacatctgaggattctgccatctattactgtgcaagaaggccggtagcgacgggccatgctatggactactggggtcaggggat
ccaagttaccgtctcctctgatc
AA
500A2 scFv (SEQ ID NO: 635)
mlytsqllglllfwisasrsdivltqtpatlslipgervtmtcktsqnigtilhwyhqkpkeapralikyasqsi
pgipsrfsgsgsetdftlsinnlepddigiyycqqsrswpvtfgpgtkleikrggggsggggsggggsqvklqqsgselgkpga
svklscktsgyiftdhyiswvkqkpgeslqwignvyggnggtsynqkfqgkatltvdkisstaymelssltsedsaiyycarrp
vatghamdywgqgiqvtvssd
5′ oligo:
Name: hIgAbcl5 (SEQ ID NO: 636)
Sequence: GTTGTTGATCAGCCAGTTCCCTCAACTCCACCTACC
3′ oligo:
Name: IgA3BB (SEQ ID NO: 637)
GTTGTTTTCGAAGGATCCGCGTCCACCTCCGCCATGACAACAGA
5′ oligo:
Name: IgGWT3 (SEQ ID NO: 638)
GTTGTTTTCGAAGGATCCGCTTTACCCGGAGACAGGGAGAGGCT
CTT
3′ oligo:
Name: hIgGWT5 (SEQ ID NO: 639)
GTTGTTAGATCTGGAGCCCAAATCTTGTGACAAAACTCACACATG
5′ oligo:
Name: FADD5 (SEQ ID NO: 640)
Sequence:
GTTGTGGATCCTTCGAACCCGTTCCTGGTGCTGCTGCACTCGGTGTCG
3′ oligo:
Name: FADD3 (SEQ ID NO: 641)
Sequence:
GTTGTTATCGATCTCGAGTTATCAGGACGCTTCGGAGGTAGATGCGTC
FADD-CSSCFV (SEQ ID NO: 642):
Gtggatccttcgaacccgttcctggtgctgctgcactcggtgtcgtccagcctgtcgagcagcgagctgacc
gagctcaagttcctatgcctcgggcgcgtgggcaagcgcaagctggagcgcgtgcagagcggcctagacctcttctccatgctgc
tggagcagaacgacctggagcccgggcacaccgagctcctgcgcgagctgctcgcctccctgcggcgccacgacctgctgcg
gcgcgtcgacgacttcgaggcgggggcggcggccggggccgcgcctggggaagaagacctgtgtgcagcatttaacgtcatat
gtgataatgtggggaaagattggagaaggctggctcgtcagctcaaagtctcagacaccaagatcgacagcatcgaggacagata
cccccgcaacctgacagagcgtgtgcgggagtcactgagaatctggaagaacacagagaaggagaacgcaacagtggcccac
ctggtgggggctctcaggtcctgccagatgaacctggtggctgacctggtacaagaggttcagcaggcccgtgacctccagaaca
ggagtggggccatgtccccgatgtcatggaactcagacgcatctacctccgaagcgtcctgataactcgagatcgataacaac
Peptide sequence (SEQ ID NO: 643):
vdpsnpflvllhsvssslssseltelkflclgrvgkrklervqsgldlfsmlleqndlepghtellrellaslrrh
dllrrvddfeagaaagaapgeedlcaafnvicdnvgkdwrrlarqlkvsdtkidsiedryprnltervreslriwkntekenatva
hlvgalrscqmnlvadlvqevqqardlqnrsgamspmswnsdastseas
Name: HCD28tm5B (SEQ ID NO: 644)
GTTGTGGATCCTCCCTTTTGGGTGCTGGTGGTGGTTGGTGTCCTG
GCTTGCTATAGCTTG
Name: HCD28tm3S (SEQ ID NO: 645)
GTTGTTTCGAACCCAGAAAATAATAAAGGCCACTGTTACTAGCA
AGCTATAGCAAGCCAG
HCD28tm5′ (SEQ ID NO: 646)
GTTGTGGATCCTCCCTTTTGGGTGCTGGTGGT
HCD28tm3′ (SEQ ID NO: 647)
GTTGTTTCGAACCCAGAAAATAATAAAGGCCAC
HCD80tm5′ (SEQ ID NO: 648)
GTTGTGGATCCTCCTGCTCCCATCCTGG
HCD80tm3′ (SEQ ID NO: 649)
GTTGTTTCGAACGGCAAAGCAGTAGGTCAGGC
Name: MFADD5BB (SEQ ID NO: 650)
Sequence:
GTTGTGGATCCTTCGAACCCATTCCTGGTGCTGCTGCACTCGCTG
Name: MFADD3XC (SEQ ID NO: 651)
Sequence:
GTTGTTATCGATCTCGAGTCAGGGTGTTTCTGAGGAAGACAC
Murine FADD Nucleotide sequence (full length, but without flanking-Ig
or transmembrane sequences) (SEQ ID NO: 652):
Gtggatccttcgaacatggacccattcctggtgctgctgcactcgctgtccggcagcctgtcgggcaacgat
ctgatggagctcaagttcttgtgccgcgagcgcgtgagcaaacgaaagctggagcgcgtgcagagtggcctggacctgttcacg
gtgctgctggagcagaacgacctggagcgcgggcacaccgggctgctgcgcgagttgctggcctcgctgcgccgacacgatct
actgcagcgcctggacgacttcgaggcggggacggcgaccgctgcgcccccgggggaggcagatctgcaggtggcatttgac
attgtgtgtgacaatgtggggagagactggaaaagactggcccgcgagctgaaggtgtctgaggccaagatggatgggattgag
gagaagtacccccgaagtctgagtgagcgggtaagggagagtctgaaagtctggaagaatgctgagaagaagaacgcctcggt
ggccggactggtcaaggcgctgcggacctgcaggctgaatctggtggctgacctggtggaagaagcccaggaatctgtgagca
agagtgagaatatgtccccagtactaagggattcaactgtgtcttcctcagaaacaccctgactcgagatcgat
Murine FADD (SEQ ID NO: 653)
vdpsnmdpflvllhslsgslsgndlmelkflcrervskrklervqsgldlftvlleqndlerghtgllrellasl
rrhdllqrlddfeagtataappgeadlqvafdivcdnvgrdwkrlarelkvseakmdgieekyprslservreslkvwknaekk
nasvaglvkalrtcrlnlvadlveeaqesvsksenmspvlrdstvsssetp
Name: MCASP3-5 (SEQ ID NO: 654)
Sequence:
GTTGTGGATCCTTCGAACATGGAGAACAACAAAACCTCAGTGGATTCA
Name: MCASP3-3 (SEQ ID NO: 655)
Sequence:
GTTGTTATCGATCTCGAGCTAGTGATAAAAGTACAGTTCTTTCGT
Name: mcasp8-5 (SEQ ID NO: 656)
Sequence:
GTTGTTTCGAACATGGATTTCCAGAGTTGTCTTTATGCTATTGCTG
Name: mcasp8-3 (SEQ ID NO: 657)
Sequence:
GTTGTTATCGATCTCGAGTCATTAGGGAGGGAAGAAGAGCTTCTTCCG
Name: hcasp3-5 (SEQ ID NO: 658)
Sequence:
GTTGTGGATCCTTCGAACATGGAGAACACTGAAAACTCAGTGGAT
Name: hcasp3-3 (SEQ ID NO: 659)
Sequence:
GTTGTTATCGATCTCGAGTTAGTGATAAAAATAGAGTTCTTTTGTGAG
Name: hcasp8-5 (SEQ ID NO: 660)
Sequence:
GTTGTGGATCCTTCGAACATGGACTTCAGCAGAAATCTTTATGAT
Name: hcasp8-3 (SEQ ID NO: 661)
Sequence:
GTTGTTATCGATGCATGCTCAATCAGAAGGGAAGACAAGTTTTTTTCT
HuIgGMHWC (SEQ ID NO: 662)
gtt gtt gat cag gag ccc aaa tct tct gac aaa act cac aca tct cca ccg tcc cca gca
cct gaa ctc ctg ggt gga ccg tca gtc ttc c
NT
2H7-human IgE (CH2—CH3—CH4) (SEQ ID NO: 663)
aagcttgccgccatggattttcaagtgcagattttcagcttcctgctaatcagtgcttcagtcataattgccagag
gacaaattgttctctcccagtctccagcaatcctgtctgcatctccaggggagaaggtcacaatgacttgcagggccagctcaagtg
taagttacatgcactggtaccagcagaagccaggatcctcccccaaaccctggatttatgccccatccaacctggcttctggagtcc
ctgctcgcttcagtggcagtgggtctgggacctcttactctctcacaatcagcagagtggaggctgaagatgctgccacttattactg
ccagcagtggagttttaacccacccacgttcggtgctgggaccaagctggagctgaaaggtggcggtggctcgggcggtggtgg
atctggaggaggtgggagctctcaggcttatctacagcagtctggggctgagctggtgaggcctggggcctcagtgaagatgtcct
gcaaggcttctggctacacatttaccagttacaatatgcactgggtaaagcagacacctagacagggcctggaatggattggagct
atttatccaggaaatggtgatacttcctacaatcagaagttcaagggcaaggccacactgactgtagacaaatcctccagcacagcc
tacatgcagctcagcagcctgacatctgaagactctgcggtctatttctgtgcaagagtggtgtactatagtaactcttactggtacttc
gatgtctggggcacagggaccacggtcaccgtctctgatcacgtctgctccagggacttcaccccgcccaccgtgaagatcttaca
gtcgtcctgcgacggcggcgggcacttccccccgaccatccagctcctgtgcctcgtctctgggtacaccccagggactatcaac
atcacctggctggaggacgggcaggtcatggacgtggacttgtccaccgcctctaccacgcaggagggtgagctggcctccaca
caaagcgagctcaccctcagccagaagcactggctgtcagaccgcacctacacctgccaggtcacctatcaaggtcacacctttg
aggacagcaccaagaagtgtgcagattccaacccgagaggggtgagcgcctacctaagccggcccagcccgttcgacctgttca
tccgcaagtcgcccacgatcacctgtctggtggtggacctggcacccagcaaggggaccgtgaacctgacctggtcccgggcca
gtgggaagcctgtgaaccactccaccagaaaggaggagaagcagcgcaatggcacgttaaccgtcacgtccaccctgccggtg
ggcacccgagactggatcgagggggagacctaccagtgcagggtgacccacccccacctgcccagggccctcatgcggtcca
cgaccaagaccagcggcccgcgtgctgccccggaagtctatgcgtttgcgacgccggagtggccggggagccgggacaagcg
caccctcgcctgcctgatccagaacttcatgcctgaggacatctcggtgcagtggctgcacaacgaggtgcagctcccggacgcc
cggcacagcacgacgcagccccgcaagaccaagggctccggcttcttcgtcttcagccgcctggaggtgaccagggccgaatg
ggagcagaaagatgagttcatctgccgtgcagtccatgaggcagcgagcccctcacagaccgtccagcgagcggtgtctgtaaat
cccggtaaatgataatctaga
AA
2H7 scFv IgE (CH2—CH3—CH4) (SEQ ID NO: 664)
mdfqvqifsfllisasviiargqivlsqspailsaspgekvtmtcrasssvsymhwyqqkpgsspkpwiy
apsnlasgvparfsgsgsgtsysltisrveaedaatyycqqwsfnpptfgagtklelkggggsggggsggggssqaylqqsgae
lvrpgasvkmsckasgytftsynmhwvkqtprqglewigaiypgngdtsynqkfkgkatltvdkssstaymqlssltsedsa
vyfcarvvyysnsywyfdvwgtgttvtvsdhvcsrdftpptvkilqsscdggghfpptiqllclvsgytpgtinitwledgqvm
dvdlstasttqegelastqseltlsqkhwlsdrtytcqvtyqghtfedstkkcadsnprgvsaylsrpspfdlfirksptitclvvdla
pskgtvnltwsrasgkpvnhstrkeekqrngtltvtstlpvgtrdwiegetyqcrvthphlpralmrsttktsgpraapevyafat
pewpgsrdkrtlacliqnfmpedisvqwlhnevqlpdarhsttqprktkgsgffvfsrlevtraeweqkdeficravheaasps
qtvqravsvnpgk
NT
2H7 scFv MH (SSS) MCH2WTCH3 (SEQ ID NO: 665)
aagcttgccgccatggattttcaagtgcagattttcagcttcctgctaatcagtgcttcagtcataattgccagag
gacaaattgttctctcccagtctccagcaatcctgtctgcatctccaggggagaaggtcacaatgacttgcagggccagctcaagtg
taagttacatgcactggtaccagcagaagccaggatcctcccccaaaccctggatttatgccccatccaacctggcttctggagtcc
ctgctcgcttcagtggcagtgggtctgggacctcttactctctcacaatcagcagagtggaggctgaagatgctgccacttattactg
ccagcagtggagttttaacccacccacgttcggtgctgggaccaagctggagctgaaagatggcggtggctcgggcggtggtgg
atctggaggaggtgggagctctcaggcttatctacagcagtctggggctgagctggtgaggcctggggcctcagtgaagatgtcct
gcaaggcttctggctacacatttaccagttacaatatgcactgggtaaagcagacacctagacagggcctggaatggattggagct
atttatccaggaaatggtgatacttcctacaatcagaagttcaagggcaaggccacactgactgtagacaaatcctccagcacagcc
tacatgcagctcagcagcctgacatctgaagactctgcggtctatttctgtgcaagagtggtgtactatagtaactcttactggtacttc
gatgtctggggcacagggaccacggtcaccgtctcttctgatcaggagcccaaatcttctgacaaaactcacacatccccaccgtc
cccagcacctgaactcctggggggatcgtcagtcttcctcttccccccaaaacccaaggacaccctcatgatctcccggacccctg
aggtcacatgcgtggtggtggacgtgagccacgaagaccctgaggtcaagttcaactggtacgtggacggcgtggaggtgcata
atgccaagacaaagccgcgggaggagcagtacaacagcacgtaccgtgtggtcagcgtcctcaccgtcctgcaccaggactgg
ctgaatggcaaggagtacaagtgcaaggtctccaacaaagccctcccagcccccatcgagaaaacaatctccaaagccaaaggg
cagccccgagaaccacaggtgtacaccctgcccccatcccgggatgagctgaccaagaaccaggtcagcctgacctgcctggtc
aaaggcttctatcccagcgacatcgccgtggagtgggagagcaatgggcagccggagaacaactacaagaccacgcctcccgt
gctggactccgacggctccttcttcctctacagcaagctcaccgtggacaagagcaggtggcagcaggggaacgtcttctcatgct
ccgtgatgcatgaggctctgcacaaccactacacgcagaagagcctctccctgtctccgggtaaatgatctaga
AA
2H7 scFv MH (SSS) MCH2WTCH3 (SEQ ID NO: 666)
mdfqvqifsfllisasviiargqivlsqspailsaspgekvtmtcrasssvsymhwyqqkpgsspkpwiy
apsnlasgvparfsgsgsgtsysltisrveaedaatyycqqwsfnpptfgagtklelkdgggsggggsggggssqaylqqsgae
lvrpgasvkmsckasgytftsynmhwvkqtprqglewigaiypgngdtsynqkfkgkatltvdkssstaymqlssltsedsa
vyfcarvvyysnsywyfdvwgtgttvtvssdqepkssdkthtsppspapellggssvflfppkpkdtlmisrtpevtcvvvdv
shedpevkfnwyvdgvevhnaktkpreeqynstyrvvsvltvlhqdwlngkeykckvsnkalpapiektiskakgqprep
qvytlppsrdeltknqvsltclvkgfypsdiavewesngqpennykttppvldsdgsfflyskltvdksrwqqgnvfscsvmh
ealhnhytqkslslspgk
NT
5B9 scFv MTHWTCH2CH3 (SEQ ID NO: 667)
aagcttgccgccatgaggttctctgctcagcttctggggctgcttgtgctctggatccctggatccactgcaga
tattgtgatgacgcaggctgcattctccaatccagtcactcttggaacatcagcttccatctcctgcaggtctagtaagagtctcctaca
tagtaatggcatcacttatttgtattggtatctgcagaagccaggccagtctcctcagctcctgatttatcagatgtccaaccttgcctca
ggagtcccagacaggttcagtagcagtgggtcaggaactgatttcacactgagaatcagcagagtggaggctgaggatgtgggtg
tttattactgtgctcaaaatctagaacttccgctcacgttcggtgctgggaccaagctggagctgaaacggggtggcggtggctcgg
gcggtggtgggtcgggtggcggcggatcgtcacaggtgcagctgaagcagtcaggacctggcctagtgcagtcctcacagagc
ctgtccatcacctgcacagtctctggtttctcattaactacctatgctgtacactgggttcgccagtctccaggaaagggtctggagtg
gctgggagtgatatggagtggtggaatcacagactataatgcagctttcatatccagactgagcatcaccaaggacgattccaaga
gccaagttttctttaaaatgaacagtctgcaacctaatgacacagccatttattactgtgccagaaatgggggtgataactacccttatt
actatgctatggactactggggtcaaggaacctcagtcaccgtctcctctgatcaggagcccaaatcttctgacaaaactcacacatc
cccaccgtccccagcacctgaactcctggggggaccgtcagtcttcctcttccccccaaaacccaaggacaccctcatgatctccc
ggacccctgaggtcacatgcgtggtggtggacgtgagccacgaagaccctgaggtcaagttcaactggtacgtggacggcgtgg
aggtgcataatgccaagacaaagccgcgggaggagcagtacaacagcacgtaccgtgtggtcagcgtcctcaccgtcctgcacc
aggactggctgaatggcaaggagtacaagtgcaaggtctccaacaaagccctcccagcccccatcgagaaaacaatctccaaag
ccaaagggcagccccgagaaccacaggtgtacaccctgcccccatcccgggatgagctgaccaagaaccaggtcagcctgacc
tgcctggtcaaaggcttctatcccagcgacatcgccgtggagtgggagagcaatgggcagccggagaacaactacaagaccac
gcctcccgtgctggactccgacggctccttcttcctctacagcaagctcaccgtggacaagagcaggtggcagcaggggaacgtc
ttctcatgctccgtgatgcatgaggctctgcacaaccactacacgcagaagagcctctccctgtctccgggtaaatgatctaga
AA
5B9 scFv MTHWTCH2CH3 (SEQ ID NO: 668)
mrfsaqllgllvlwipgstadivmtqaafsnpvtlgtsasiscrssksllhsngitylywylqkpgqspqlli
yqmsnlasgvpdrfsssgsgtdftlrisrveaedvgvyycaqnlelpltfgagtklelkrggggsggggsggggssqvqlkqsg
pglvqssqslsitctvsgfslttyavhwvrqspgkglewlgviwsggitdynaafisrlsitkddsksqvffkmnslqpndtaiy
ycarnggdnypyyyamdywgqgtsvtvssdqepkssdkthtsppspapellggpsvflfppkpkdtlmisrtpevtcvvvd
vshedpevkfnwyvdgvevhnaktkpreeqynstyrvvsvltvlhqdwlngkeykckvsnkalpapiektiskakgqpre
pqvytlppsrdeltknqvsltclvkgfypsdiavewesngqpennykttppvldsdgsfflyskltvdksrwqqgnvfscsvm
healhnhytqkslslspgk

[0333] From the foregoing, it will be appreciated that, although specific embodiments of the invention have been described herein for the purpose of illustration, various modifications may be made without deviating from the spirit and scope of the invention. Accordingly, the present invention is not limited except as by the appended claims.

1.-37. (canceled)

38. A method for treating a disease involving a B cell disorder, wherein the disease involving a B cell disorder is a malignancy or an immune system disorder, comprising administering to a subject in need thereof a therapeutically effective amount of a single chain binding domain-immunoglobulin fusion protein that binds human CD37, wherein said fusion protein comprises from N-terminus to C-terminus:
(a) a human CD37-specific single chain Fv (scFv) binding domain polypeptide;
(b) a human IgG1 hinge region polypeptide comprising a mutated human IgG1 hinge peptide as set forth in amino acids 269-283 of SEQ ID NO:397, 398, 582, or 586; and
(c) human IgG1 heavy chain constant region domains CH2 and CH3.

39. The method of claim 38, wherein the scFv binding domain polypeptide comprises a heavy chain variable region of CD37-specific monoclonal antibody G28-1.

40. The method of claim 38, wherein the scFv binding domain polypeptide comprises a light chain variable region of CD37-specific monoclonal antibody G28-1.

41. The method of claim 38, wherein the scFv binding domain polypeptide comprises a light chain variable region and a heavy chain variable region of CD37-specific monoclonal antibody G28-1.

42. The method of claim 38, wherein the scFv binding domain polypeptide comprises amino acids 21-259 shown in SEQ ID NO:13.

43. The method of claim 38, wherein the scFv variable domains are joined by a linker polypeptide comprising an amino acid sequence of Gly-Gly-Gly-Gly-Ser (SEQ ID NO:39).

44. The method of claim 38, wherein the scFv binding domain polypeptide is humanized.

45. The method of claim 44, wherein the scFv binding domain polypeptide comprises a humanized heavy chain variable region of CD37-specific monoclonal antibody G28-1.

46. The method of claim 44, wherein the scFv binding domain polypeptide comprises a humanized light chain variable region of CD37-specific monoclonal antibody G28-1.

47. The method of claim 44, wherein the scFv binding domain polypeptide comprises a humanized light chain variable region and a humanized heavy chain variable region of CD37-specific monoclonal antibody G28-1.

48. The method of claim 44, wherein the scFv binding domain polypeptide is a humanized amino acid sequence of amino acids 21-259 shown in SEQ ID NO:13.

49. The method of claim 38, wherein the human IgG1 hinge region polypeptide comprises the mutated human IgG1 hinge peptide as set forth in amino acids 269-283 of SEQ ID NO:586.

50. The method of claim 38, wherein the heavy chain constant region domains CH2 and CH3 comprise amino acids 284-500 of SEQ ID NO:586.

51. The method of claim 38, wherein the disease involving a B cell disorder is the immune system disorder, and wherein the immune system disorder is rheumatoid arthritis, psoriasis, systemic lupus erythematosus, type 1 diabetes mellitus, multiple sclerosis, inflammatory bowel disease, Crohn's disease, or ulcerative colitis.

52. The method of claim 38, wherein the disease involving a B cell disorder is the malignancy.

53. The method of claim 52, wherein the malignancy is chronic lymphocytic leukemia.

54. A method for treating a disease involving a B cell disorder, wherein the disease involving a B cell disorder is a malignancy or an immune system disorder, comprising administering to a subject in need thereof a therapeutically effective amount of a single chain binding domain-immunoglobulin fusion protein that binds human CD37, wherein said fusion protein comprises from N-terminus to C-terminus:
(a) a human CD37-specific single chain Fv (scFv) binding domain polypeptide, wherein the scFv binding domain polypeptide comprises an immunoglobulin light chain variable region as set forth in amino acids 21-127 of SEQ ID NO:13 and an immunoglobulin heavy chain variable region as set forth in amino acids 144-259 of SEQ ID NO:13;
(b) a human IgG1 hinge region polypeptide comprising amino acids 269-283 of SEQ ID NO:586;
(c) an immunoglobulin heavy chain CH2 constant region polypeptide as set forth in amino acids 284-393 of SEQ ID NO:586, and
(d) an immunoglobulin heavy chain CH3 constant region polypeptide as set forth in amino acids 394-500 of SEQ ID NO:586.

55. The method of claim 54, wherein the scFv binding domain polypeptide comprises amino acids 21-259 of SEQ ID NO:13.

56. The method of claim 54, wherein the disease involving a B cell disorder is the immune system disorder, and wherein the immune system disorder is rheumatoid arthritis, psoriasis, systemic lupus erythematosus, type 1 diabetes mellitus, multiple sclerosis, inflammatory bowel disease, Crohn's disease, or ulcerative colitis.

57. The method of claim 54, wherein the disease involving a B cell disorder is the malignancy.

58. The method of claim 57, wherein the malignancy is chronic lymphocytic leukemia.

The application's sequence listing, which the Patent Office published only in electronic form, follows.

SEQUENCE LISTING (668 sequences)

SEQ ID NO: 1 - DNA, 812 bp, Artificial sequence
  2H7 scFv
  sig_peptide (13)..(78)
  V_region (79)..(396): light chain variable region for anti-CD20 scFv
  misc_feature (397)..(444): asp-gly3ser(gly4ser) 2-ser peptide linker
  V_region (445)..(808): heavy chain variable region for anti-CD20 scFv
aagcttgccgccatggattttcaagtgcagattttcagcttcctgctaatcagtgcttcagtcataattgccagaggacaaattgttctctcccagtctccagcaatcctgtctgcatctccaggggagaaggtcacaatgacttgcagggccagctcaagtgtaagttacatgcactggtaccagcagaagccaggatcctcccccaaaccctggatttatgccccatccaacctggcttctggagtccctgctcgcttcagtggcagtgggtctgggacctcttactctctcacaatcagcagagtggaggctgaagatgctgccacttattactgccagcagtggagttttaacccacccacgttcggtgctgggaccaagctggagctgaaaggtggcggtggctcgggcggtggtggatctggaggaggtgggagctctcaggcttatctacagcagtctggggctgagctggtgaggcctggggcctcagtgaagatgtcctgcaaggcttctggctacacatttaccagttacaatatgcactgggtaaagcagacacctagacagggcctggaatggattggagctatttatccaggaaatggtgatacttcctacaatcagaagttcaagggcaaggccacactgactgtagacaaatcctccagcacagcctacatgcagctcagcagcctgacatctgaagactctgcggtctatttctgtgcaagagtggtgtactatagtaactcttactggtacttcgatgtctggggcacagggaccacggtcaccgtctctgatca

SEQ ID NO: 2 - DNA, 1518 bp, Artificial sequence
  2H7 scFv WTHWTCH2CH3
  misc_feature (13)..(807): Murine anti-human CD20 scFv
  C_region (808)..(1513): Human IgG1 Fc tail, wild type hinge, CH2 and CH3
aagcttgccgccatggattttcaagtgcagattttcagcttcctgctaatcagtgcttcagtcataattgccagaggacaaattgttctctcccagtctccagcaatcctgtctgcatctccaggggagaaggtcacaatgacttgcagggccagctcaagtgtaagttacatgcactggtaccagcagaagccaggatcctcccccaaaccctggatttatgccccatccaacctggcttctggagtccctgctcgcttcagtggcagtgggtctgggacctcttactctctcacaatcagcagagtggaggctgaagatgctgccacttattactgccagcagtggagttttaacccacccacgttcggtgctgggaccaagctggagctgaaagatggcggtggctcgggcggtggtggatctggaggaggtgggagctctcaggcttatctacagcagtctggggctgagctggtgaggcctggggcctcagtgaagatgtcctgcaaggcttctggctacacatttaccagttacaatatgcactgggtaaagcagacacctagacagggcctggaatggattggagctatttatccaggaaatggtgatacttcctacaatcagaagttcaagggcaaggccacactgactgtagacaaatcctccagcacagcctacatgcagctcagcagcctgacatctgaagactctgcggtctatttctgtgcaagagtggtgtactatagtaactcttactggtacttcgatgtctggggcacagggaccacggtcaccgtctctgatcaggagcccaaatcttgtgacaaaactcacacatgcccaccgtgcccagcacctgaactcctggggggaccgtcagtcttcctcttccccccaaaacccaaggacaccctcatgatctcccggacccctgaggtcacatgcgtggtggtggacgtgagccacgaagaccctgaggtcaagttcaactggtacgtggacggcgtggaggtgcataatgccaagacaaagccgcgggaggagcagtacaacagcacgtaccgtgtggtcagcgtcctcaccgtcctgcaccaggactggctgaatggcaaggagtacaagtgcaaggtctccaacaaagccctcccagcccccatcgagaaaacaatctccaaagccaaagggcagccccgagaaccacaggtgtacaccctgcccccatcccgggatgagctgaccaagaaccaggtcagcctgacctgcctggtcaaaggcttctatcccagcgacatcgccgtggagtgggagagcaatgggcagccggagaacaactacaagaccacgcctcccgtgctggactccgacggctccttcttcctctacagcaagctcaccgtggacaagagcaggtggcagcaggggaacgtcttctcatgctccgtgatgcatgaggctctgcacaaccactacacgcagaagagcctctccctgtctccgggtaaatgatctaga

SEQ ID NO: 3 - DNA, 1518 bp, Artificial sequence
  2H7scFvMTH(SSS)MTCH2WCH3
  misc_feature (13)..(807): Mouse anti-human CD20 scFv
  C_region (808)..(1513): Hinge cysteines (826-829; 844-847; 853-856) mutated to serines proline to serine mutation (880-883) in Ch2 disrupts effector function
aagcttgccgccatggattttcaagtgcagattttcagcttcctgctaatcagtgcttcagtcataattgccagaggacaaattgttctctcccagtctccagcaatcctgtctgcatctccaggggagaaggtcacaatgacttgcagggccagctcaagtgtaagttacatgcactggtaccagcagaagccaggatcctcccccaaaccctggatttatgccccatccaacctggcttctggagtccctgctcgcttcagtggcagtgggtctgggacctcttactctctcacaatcagcagagtggaggctgaagatgctgccacttattactgccagcagtggagttttaacccacccacgttcggtgctgggaccaagctggagctgaaagatggcggtggctcgggcggtggtggatctggaggaggtgggagctctcaggcttatctacagcagtctggggctgagctggtgaggcctggggcctcagtgaagatgtcctgcaaggcttctggctacacatttaccagttacaatatgcactgggtaaagcagacacctagacagggcctggaatggattggagctatttatccaggaaatggtgatacttcctacaatcagaagttcaagggcaaggccacactgactgtagacaaatcctccagcacagcctacatgcagctcagcagcctgacatctgaagactctgcggtctatttctgtgcaagagtggtgtactatagtaactcttactggtacttcgatgtctggggcacagggaccacggtcaccgtctctgatcaggagcccaaatcttctgacaaaactcacacatccccaccgtccccagcacctgaactcctggggggatcgtcagtcttcctcttccccccaaaacccaaggacaccctcatgatctcccggacccctgaggtcacatgcgtggtggtggacgtgagccacgaagaccctgaggtcaagttcaactggtacgtggacggcgtggaggtgcataatgccaagacaaagccgcgggaggagcagtacaacagcacgtaccgtgtggtcagcgtcctcaccgtcctgcaccaggactggctgaatggcaaggagtacaagtgcaaggtctccaacaaagccctcccagcccccatcgagaaaacaatctccaaagccaaagggcagccccgagaaccacaggtgtacaccctgcccccatcccgggatgagctgaccaagaaccaggtcagcctgacctgcctggtcaaaggcttctatcccagcgacatcgccgtggagtgggagagcaatgggcagccggagaacaactacaagaccacgcctcccgtgctggactccgacggctccttcttcctctacagcaagctcaccgtggacaagagcaggtggcagcaggggaacgtcttctcatgctccgtgatgcatgaggctctgcacaaccactacacgcagaagagcctctccctgtctccgggtaaatgatctaga

SEQ ID NO: 4 - DNA, 1518 bp, Artificial sequence
  2H7 scFv MTH(SSS)WTCH2CH3
  misc_feature (13)..(807): Mouse anti-human CD20 scFv
  C_region (808)..(1513): Hinge cysteines mutated to serines (826-829; 844-847; 853-856) wild type CD2 and CD3 domains mediate effector functions
aagcttgccgccatggattttcaagtgcagattttcagcttcctgctaatcagtgcttcagtcataattgccagaggacaaattgttctctcccagtctccagcaatcctgtctgcatctccaggggagaaggtcacaatgacttgcagggccagctcaagtgtaagttacatgcactggtaccagcagaagccaggatcctcccccaaaccctggatttatgccccatccaacctggcttctggagtccctgctcgcttcagtggcagtgggtctgggacctcttactctctcacaatcagcagagtggaggctgaagatgctgccacttattactgccagcagtggagttttaacccacccacgttcggtgctgggaccaagctggagctgaaagatggcggtggctcgggcggtggtggatctggaggaggtgggagctctcaggcttatctacagcagtctggggctgagctggtgaggcctggggcctcagtgaagatgtcctgcaaggcttctggctacacatttaccagttacaatatgcactgggtaaagcagacacctagacagggcctggaatggattggagctatttatccaggaaatggtgatacttcctacaatcagaagttcaagggcaaggccacactgactgtagacaaatcctccagcacagcctacatgcagctcagcagcctgacatctgaagactctgcggtctatttctgtgcaagagtggtgtactatagtaactcttactggtacttcgatgtctggggcacagggaccacggtcaccgtctctgatcaggagcccaaatcttctgacaaaactcacacatccccaccgtccccagcacctgaactcctggggggaccgtcagtcttcctcttccccccaaaacccaaggacaccctcatgatctcccggacccctgaggtcacatgcgtggtggtggacgtgagccacgaagaccctgaggtcaagttcaactggtacgtggacggcgtggaggtgcataatgccaagacaaagccgcgggaggagcagtacaacagcacgtaccgtgtggtcagcgtcctcaccgtcctgcaccaggactggctgaatggcaaggagtacaagtgcaaggtctccaacaaagccctcccagcccccatcgagaaaacaatctccaaagccaaagggcagccccgagaaccacaggtgtacaccctgcccccatcccgggatgagctgaccaagaaccaggtcagcctgacctgcctggtcaaaggcttctatcccagcgacatcgccgtggagtgggagagcaatgggcagccggagaacaactacaagaccacgcctcccgtgctggactccgacggctccttcttcctctacagcaagctcaccgtggacaagagcaggtggcagcaggggaacgtcttctcatgctccgtgatgcatgaggctctgcacaaccactacacgcagaagagcctctccctgtctccgggtaaatgatctaga

SEQ ID NO: 5 - DNA, 1524 bp, Artificial sequence
  2H7 IgAHWTHG1C
  misc_feature (1)..(796): Mouse anti-human CD20 scFv
  N_region (797)..(864): Human IGA hinge region
  C_region (865)..(1518): Human IgG1 CH2 and CH3 wild type Fc domain
atggattttcaagtgcagattttcagcttcctgctaatcagtgcttcagtcataattgccagaggacaaattgttctctcccagtctccagcaatcctgtctgcatctccaggggagaaggtcacaatgacttgcagggccagctcaagtgtaagttacatgcactggtaccagcagaagccaggatcctcccccaaaccctggatttatgccccatccaacctggcttctggagtccctgctcgcttcagtggcagtgggtctgggacctcttactctctcacaatcagcagagtggaggctgaagatgctgccacttattactgccagcagtggagttttaacccacccacgttcggtgctgggaccaagctggagctgaaagatggcggtggctcgggcggtggtggatctggaggaggtgggagctctcaggcttatctacagcagtctggggctgagctggtgaggcctggggcctcagtgaagatgtcctgcaaggcttctggctacacatttaccagttacaatatgcactgggtaaagcagacacctagacagggcctggaatggattggagctatttatccaggaaatggtgatacttcctacaatcagaagttcaagggcaaggccacactgactgtagacaaatcctccagcacagcctacatgcagctcagcagcctgacatctgaagactctgcggtctatttctgtgcaagagtggtgtactatagtaactcttactggtacttcgatgtctggggcacagggaccacggtcaccgtctctgatcagccagttccctcaactccacctaccccatctccctcaactccacctaccccatctccctcatgcgcacctgaactcctggggggaccgtcagtcttcctcttccccccaaaacccaaggacaccctcatgatctcccggacccctgaggtcacatgcgtggtggtggacgtgagccacgaagaccctgaggtcaagttcaactggtacgtggacggcgtggaggtgcataatgccaagacaaagccgcgggaggagcagtacaacagcacgtaccgtgtggtcagcgtcctcaccgtcctgcaccaggactggctgaatggcaaggagtacaagtgcaaggtctccaacaaagccctcccagcccccatcgagaaaacaatctccaaagccaaagggcagccccgagaaccacaggtgtacaccctgcccccatcccgggatgagctgaccaagaaccaggtcagcctgacctgcctggtcaaaggcttctatcccagcgacatcgccgtggagtgggagagcaatgggcagccggagaacaactacaagaccacgcctcccgtgctggactccgacggctccttcttcctctacagcaagctcaccgtggacaagagcaggtggcagcaggggaacgtcttctcatgctccgtgatgcatgaggctctgcacaaccactacacgcagaagagcctctccctgtctccgggtaaatgatctaga

SEQ ID NO: 6 - DNA, 711 bp, Artificial sequence
  hUMAN IgG1 Fc (SSS hinge)
  misc_feature (1)..(705): Hinge cysteines mutated to serines (19-21; 37-39; 46-48)
gatcaggagcccaaatcttctgacaaaactcacacatccccaccgtccccagcacctgaactcctggggggaccgtcagtcttcctcttccccccaaaacccaaggacaccctcatgatctcccggacccctgaggtcacatgcgtggtggtggacgtgagccacgaagaccctgaggtcaagttcaactggtacgtggacggcgtggaggtgcataatgccaagacaaagccgcgggaggagcagtacaacagcacgtaccgtgtggtcagcgtcctcaccgtcctgcaccaggactggctgaatggcaaggagtacaagtgcaaggtctccaacaaagccctcccagcccccatcgagaaaacaatctccaaagccaaagggcagccccgagaaccacaggtgtacaccctgcccccatcccgggatgagctgaccaagaaccaggtcagcctgacctgcctggtcaaaggcttctatcccagcgacatcgccgtggagtgggagagcaatgggcagccggagaacaactacaagaccacgcctcccgtgctggactccgacggctccttcttcctctacagcaagctcaccgtggacaagagcaggtggcagcaggggaacgtcttctcatgctccgtgatgcatgaggctctgcacaaccactacacgcagaagagcctctccctgtctccgggtaaatgatctaga

SEQ ID NO: 7 - DNA, 729 bp, Artificial sequence
  Human IgA-derived hinge chimera with human IgG1 CH2
  N_region (1)..(69): Human IGA hinge
  C_region (70)..(723): Human wild type IgG1 CH2 and CH3, Fc
gatcagccagttccctcaactccacctaccccatctccctcaactccacctaccccatctccctcatgcgcacctgaactcctggggggaccgtcagtcttcctcttccccccaaaacccaaggacaccctcatgatctcccggacccctgaggtcacatgcgtggtggtggacgtgagccacgaagaccctgaggtcaagttcaactggtacgtggacggcgtggaggtgcataatgccaagacaaagccgcgggaggagcagtacaacagcacgtaccgtgtggtcagcgtcctcaccgtcctgcaccaggactggctgaatggcaaggagtacaagtgcaaggtctccaacaaagccctcccagcccccatcgagaaaacaatctccaaagccaaagggcagccccgagaaccacaggtgtacaccctgcccccatcccgggatgagctgaccaagaaccaggtcagcctgacctgcctggtcaaaggcttctatcccagcgacatcgccgtggagtgggagagcaatgggcagccggagaacaactacaagaccacgcctcccgtgctggactccgacggctccttcttcctctacagcaagctcaccgtggacaagagcaggtggcagcaggggaacgtcttctcatgctccgtgatgcatgaggctctgcacaaccactacacgcagaagagcctctccctgtctccgggtaaatgatctaga

SEQ ID NO: 8 - DNA, 825 bp, Artificial sequence
  HD37 scFv
  misc_feature (13)..(72): Light chain leader peptide
  V_region (73)..(405): Light chain variable domain for mouse anti-human CD19; HD37
  misc_feature (406)..(450): Synthetic (Gly4Ser) 3 linker peptide
  V_region (454)..(825): Heavy chain variable domain for mouse anti-human CD-19: HD37
aagcttgccgccatggagacagacacactcctgctatgggtgctgctgctctgggttccaggctccactggtgacattgtgctgacccaatctccagcttctttggctgtgtctctagggcagagggccaccatctcctgcaaggccagccaaagtgttgattatgatggtgatagttatttgaactggtaccaacagattccaggacagccacccaaactcctcatctatgatgcatccaatctagtttctgggatcccacccaggtttagtggcagtgggtctgggacagacttcaccctcaacatccatcctgtggagaaggtggatgctgcaacctatcactgtcagcaaagtactgaggatccgtggacgttcggtggaggcaccaagctggaaatcaaaggtggcggtggctcgggcggtggtgggtcgggtggcggcggatcgtcacaggttcagctgcagcagtctggggctgagctggtgaggcctgggtcctcagtgaagatttcctgcaaggcttctggctatgcattcagtagctactggatgaactgggtgaagcagaggcctggacagggtcttgagtggattggacagatttggcctggagatggtgatactaactacaatggaaagttcaagggtaaagccactctgactgcagacgaatcctccagcacagcctacatgcaactcagcagcctagcatctgaggactctgcggtctatttctgtgcaagacgggagactacgacggtaggccgttattactatgctatggactactggggtcaaggaacctcagtcaccgtctcctca

SEQ ID NO: 9 - DNA, 795 bp, Artificial sequence
  G28-1 scFv
  misc_feature (13)..(72): Light chain leader peptide sequence
  V_region (73)..(393): Light chain variable domain for mouse anti-human CD37: G28-1
  misc_feature (394)..(441): Synthetic linker peptide encoded (Gly4Ser) 3
  V_region (442)..(795): Heavy chain variable domain for mouse anti-human CD37: G28-1
aagcttgccgccatggtatccacagctcagttccttgggttgctgctgctgtggcttacaggtggcagatgtgacatccagatgactcagtctccagcctccctatctgcatctgtgggagagactgtcaccatcacatgtcgaacaagtgaaaatgtttacagttatttggcttggtatcagcagaaacagggaaaatctcctcagctcctggtctcttttgcaaaaaccttagcagaaggtgtgccatcaaggttcagtggcagtggatcaggcacacagttttctctgaagatcagcagcctgcagcctgaagattctggaagttatttctgtcaacatcattccgataatccgtggacgttcggtggaggcaccgaactggagatcaaaggtggcggtggctcgggcggtggtgggtcgggtggcggcggatcgtcagcggtccagctgcagcagtctggacctgagctggaaaagcctggcgcttcagtgaagatttcctgcaaggcttctggttactcattcactggctacaatatgaactgggtgaagcagaataatggaaagagccttgagtggattggaaatattgatccttattatggtggtactacctacaaccggaagttcaagggcaaggccacattgactgtagacaaatcctccagcacagcctacatgcagctcaagagtctgacatctgaggactctgcagtctattactgtgcaagatcggtcggccctatggactactggggtcaaggaacctcagtcaccgtctcttctgatcag

SEQ ID NO: 10 - DNA, 824 bp, Artificial sequence
  G28-7
  sig_peptide (1)..(61): Native light chain leader peptide
  V_region (62)..(397): Light chain variable domain for mouse anti-human CD22: G28-7
  misc_feature (398)..(445): (Gly4Ser) 3 linker peptide
  V_region (445)..(818): Heavy chain variable domain for mouse anti-human CD22: G28-7
  misc_feature (819)..(824): BcII restriction site
atggagtcacattcccaggtctttctctccctgctgctctgggtatctggtacctgtgggaacattatgatgacacagtcgccatcatctctggctgtgtcagcaggagaaaaggtcactatgaactgtaagtccagtcaaagtgttttctacagttcaaatcagaggaattatttggcctggtatcagcagaaaccagggcagtctcccaaattgctgatctactgggcatctactagggaatctggtgtccctgatcgcttcacaggcagtggatccgggacagactttactcttaccatcagcagtgtacatactgaagacctggcagtttattactgtcatcaattcctctcttcgtggacgttcggtggaggcaccaagctggaaatcaaaggcggtggtggttcgggtggtggtggttcgggtggcggcggatcttctcaggtccaactgcagcagcctggggctgaactggtgaagcctgggacttcagtgaagctgtcctgcaaggcctctggctacaccttcaccaactactggatggtctgggtgaagcagacgcctggagaaggccttgagtggattggagaaattattcctagcaacggtcgtactaaatacaatgagaagttcaagagcaaggccacactgactgcagacaaatcctcccgcacagcctacatgcaactcagcagcctggcatctgaggactctgcggtctattattgtgcaagagagatgtccattattactacggtactgactcccggtttgcttactggggccaagggactctggtcactgtctctgcagcctgatca

SEQ ID NO: 11 - protein, 266 aa, Mus musculus
  INIT_MET (1)..(1)
  SIGNAL (1)..(22)
  DOMAIN (23)..(128): Light chain variable domain for mouse anti-human CD20
  SITE (129)..(144): Asp=(Gly3Ser)-(Gly4Ser) 2-Ser Linker Peptide
  DOMAIN (145)..(266): Heavy chain variable domain for mouse anti-human CD20
MDFQVQIFSFLLISASVIIARGQIVLSQSPAILSASPGEKVTMTCRASSSVSYMHWYQQKPGSSPKPWIYAPSNLASGVPARFSGSGSGTSYSLTISRVEAEDAATYYCQQWSFNPPTFGAGTKLELKDGGGSGGGGSGGGGSSQAYLQQSGAELVRPGASVKMSCKASGYTFTSYNMHWVKQTPRQGLEWIGAIYPGNGDTSYNQKFKGKATLTVDKSSSTAYMQLSSLTSEDSAVYFCARVVYYSNSYWYFDVWGTGTTVTVSD

SEQ ID NO: 12 - protein, 271 aa, Mus musculus
  SITE (1)..(271): Mouse anti-human CD19 scFv
METDTLLLWVLLLWVPGSTGDIVLTQSPASLAVSLGQRATISCKASQSVDYDGDSYLNWYQQIPGQPPKLLIYDASNLVSGIPPRFSGSGSGTDFTLNIHPVEKVDAATYHCQQSTEDPWTFGGGTKLEIKGGGGSGGGGSGGGGSSQVQLQQSGAELVRPGSSVKISCKASGYAFSSYWMNWVKQRPGQGLEWIGQIWPGDGDTNYNGKFKGKATLTADESSSTAYMQLSSLASEDSAVYFCARRETTTVGRYYYAMDYWGQGTSVTVSS

SEQ ID NO: 13 - protein, 261 aa, Mus musculus
  SITE (1)..(259): Mouse anti-human CD37 scFv
MVSTAQFLGLLLLWLTGGRCDIQMTQSPASLSASVGETVTITCRTSENVYSYLAWYQQKQGKSPQLLVSFAKTLAEGVPSRFSGSGSGTQFSLKISSLQPEDSGSYFCQHHSDNPWTFGGGTELEIKGGGGSGGGGSGGGGSSAVQLQQSGPELEKPGASVKISCKASGYSFTGYNMNWVKQNNGKSERLEWIGNIDPYYGGTTYNRKFKGKATLTVDKSSSTAYMQLKSLTSEDSAVYYCARSVGPMDYWGQGTSVTVSS

SEQ ID NO: 14 - protein, 272 aa, Mus musculus
  SITE (1)..(272): Mouse anti-human CD22 scFv
MESHSQVFLSLLLWVSGTCGNIMMTQSPSSLAVSAGEKVTMNCKSSQSVFYSSNQRNYLAWYQQKPGQSPKLLIYWASTRESGVPDRFTGSGSGTDFTLTISSVHTEDLAVYYCHQFLSSWTFGGGTKLEIKGGGGSGGGGSGGGGSSQVQLQQPGAELVKPGTSVKLSCKASGYTFTNYWMVWVKQTPGEGLEWIGEIIPSNGRTKYNEKFKSKATLTADKSSRTAYMQLSSLASEDSAVYYCAREMSIITTVLTPGLLTGAKGLWSLSLQ

SEQ ID NO: 15 - protein, 499 aa, Artificial sequence
  2H7 scFv-hIgG1 WTHWTCH2CH3
  SITE (1)..(265): Mouse anti-human CD20 scFv: 2H7
  DOMAIN (266)..(499): Human IgG1 wild type hinge, CH2, CH3, Fc
MDFQVQIFSFLLISASVIIARGQIVLSQSPAILSASPGEKVTMTCRASSSVSYMHWYQQKPGSSPKPWIYAPSNLASGVPARFSGSGSGTSYSLTISRVEAEDAATYYCQQWSFNPPTFGAGTKLELKDGGGSGGGGSGGGGSSQAYLQQSGAELVRPGASVKMSCKASGYTFTSYNMHWVKQTPRQGLEWIGAIYPGNGDTSYNQKFKGKATLTVDKSSSTAYMQLSSLTSEDSAVYFCARVVYYSNSYWYFDVWGTGTTVTVSDQEPKSCDKTHTCPPCPAPELLGGPSVFLFPPKPKDTLMISRTPEVTCVVVDVSHEDPEVKFNWYVDGVEVHNAKTKPREEQYNSTYRVVSVLTVLHQDWLNGKEYKCKVSNKALPAPIEKTISKAKGQPREPQVYTLPPSRDELTKNQVSLTCLVKGFYPSDIAVEWESNGQPENNYKTTPPVLDSDGSFFLYSKLTVDKSRWQQGNVFSCSVMHEALHNHYTQKSLSLSPGK

SEQ ID NO: 16 - protein, 499 aa, Artificial sequence
  MHMG1C
  SITE (1)..(265): 2H7 scFv targeted to human CD20
  DOMAIN (265)..(499): Hinge cysteines mutated to serines (amino acids 272, 278, 281) proline in CH2 mutated to serine (amino acid 290)
MDFQVQIFSFLLISASVIIARGQIVLSQSPAILSASPGEKVTMTCRASSSVSYMHWYQQKPGSSPKPWIYAPSNLASGVPARFSGSGSGTSYSLTISRVEAEDAATYYCQQWSFNPPTFGAGTKLELKDGGGSGGGGSGGGGSSQAYLQQSGAELVRPGASVKMSCKASGYTFTSYNMHWVKQTPRQGLEWIGAIYPGNGDTSYNQKFKGKATLTVDKSSSTAYMQLSSLTSEDSAVYFCARVVYYSNSYWYFDVWGTGTTVTVSDQEPKSSDKTHTSPPSPAPELLGGSSVFLFPPKPKDTLMISRTPEVTCVVVDVSHEDPEVKFNWYVDGVEVHNAKTKPREEQYNSTYRVVSVLTVLHQCWLNGKEYKCKVSNKALPAPIEKTISKAKGQPREPQVYTLPPSRDELTKNQVSLTCLVKGFYPSDIAVEWESNGQPENNYKTTPPVLDSDGSFFLYSKLTVDKSRWQQGNVFSCSVMHEALHNHYTQKSLSLSPGK

SEQ ID NO: 17 - protein, 499 aa, Artificial sequence
  MHWTG1C
  SITE (1)..(265): Mouse anti-human CD20 scFv: 2H7
  DOMAIN (266)..(499): Hinge cysteines mutated to serines (amino acids  272, 278, 281) CH2 and CH3 domains are wild type in sequence
MDFQVQIFSFLLISASVIIARGQIVLSQSPAILSASPGEKVTMTCRASSSVSYMHWYQQKPGSSPKPWIYAPSNLASGVPARFSGSGSGTSYSLTISRVEAEDAATYYCQQWSFNPPTFGAGTKLELKDGGGSGGGGSGGGGSSQAYLQQSGAELVRPGASVKMSCKASGYTFTSYNMHWVKQTPRQGLEWIGAIYPGNGDTSYNQKFKGKATLTVDKSSSTAYMQLSSLTSEDSAVYFCARVVYYSNSYWYFDVWGTGTTVTVSDQEPKSSDKTHTSPPSPAPELLGGPSVFLFPPKPKDTLMISRTPEVTCVVVDVSHEDPEVKFNWYVDGVEVHNAKTKPREEQYNSTYRVVSVLTVLHQDWLNGKEYKCKVSNKALPAPIEKTISKAKGQPREPQVYTLPPSRDELTKNQVSLTCLVKGFYPSDIAVEWESNGQPENNYKTTPPVLDSDGSFFLYSKLTVDKSRWQQGNVFSCSVMHEALHNHYTQKSLSLSPGK

SEQ ID NO: 18 - protein, 506 aa, Artificial sequence
  IgAHWTHG1C
  SITE (1)..(265): Mouse anti-human CD20 scFv: 2H7
  DOMAIN (266)..(288): Wild type IGA hinge
  DOMAIN (289)..(505): Human IgG1 CH2 and CH3 domains, wild type sequence
MDFQVQIFSFLLISASVIIARGQIVLSQSPAILSASPGEKVTMTCRASSSVSYMHWYQQKPGSSPKPWIYAPSNLASGVPARFSGSGSGTSYSLTISRVEAEDAATYYCQQWSFNPPTFGAGTKLELKDGGGSGGGGSGGGGSSQAYLQQSGAELVRPGASVKMSCKASGYTFTSYNMHWVKQTPRQGLEWIGAIYPGNGDTSYNQKFKGKATLTVDKSSSTAYMQLSSLTSEDSAVYFCARVVYYSNSYWYFDVWGTGTTVTVSDQPVPSTPPTPSPSTPPTPSPSCAPELLGGPSVFLFPPKPKDTLMISRTPEVTCVVVDVSHEDPEVKFNWYVDGVEVHNAKTKPREEQYNSTYRVVSVLTVLHQDWLNGKEYKCKVSNKALPAPIEKTISKAKGGQPREPQVYTLPPSRDELTKNQVSLTCLVKGFYPSDIAVEWESNGQPENNYKTTPPVLDSDGSFFLYSKLTVDKSRWQQGNVFSCSVMHEALHNHYTQKSLSLSPGK

SEQ ID NO: 19 - protein, 234 aa, Homo sapiens
  DOMAIN (1)..(234): Mutant IgG1 hinge (amino acids 7, 13, 16) wild type CH2 and CH3 domains alternative carboxy terminus of scFvig fusion proteins
DQEPKSSDKTHTSPPSPAPELLGGPSVFLFPPKPKDTLMISRTPEVTCVVVDVSHEDPEVKFNWYVDGVEVHNAKTKPREEQYNSTYRVVSVLTVLHQDWLNGKEYKCKVSNKALPAPIEKTISKAKGQPREPQVYTLPPSRDELTKNQVSLTCLVKGFYPSDIAVEWESNGQPENNYKTTPPVLDSDGSFFLYSKLTVDKSRWQQGNVFSCSVMHEALHNHYTQKSLSLSPGK

SEQ ID NO: 20 - protein, 240 aa, Homo sapiens
  SITE (1)..(23): Alternative carboxy terminus of scFvig fusion proteins
  DOMAIN (24)..(240): Human IgG1 wild type Ch2 and CH3 Fc
DQPVPSTPPTPSPSTPPTPSPSCAPELLGGPSVFLFPPKPKDTLMISRTPEVTCVVVDVSHEDPEVKFNWYVDGVEVHNAKTKPREEQYNSTYRVVSVLTVLHQDWLNGKEYKCKVSNKALPAPIEKTISKAKGQPREPQVYTLPPSRDELTKNQVSLTCLVKGFYPSDIAVEWESNGQPENNYKTTPPVLDSDGSFFLYSKLTVDKSRWQQGNVFSCSVMHEALHNHYTQKSLSLSPGK

SEQ ID NO: 21 - DNA, 1470 bp, Artificial sequence
  2H7scFv-CD154 L2
  misc_feature (1)..(808): Mouse anti-human CD20 scFv
  misc_feature (814)..(1455): Human extracellular domain long form, CD154
aagcttgccgccatggattttcaagtgcagattttcagcttcctgctaatcagtgcttcagtcataattgccagaggacaaattgttctctcccagtctccagcaatcctgtctgcatctccaggggagaaggtcacaatgacttgcagggccagctcaagtgtaagttacatgcactggtaccagcagaagccaggatcctcccccaaaccctggatttatgccccatccaacctggcttctggagtccctgctcgcttcagtggcagtgggtctgggacctcttactctctcacaatcagcagagtggaggctgaagatgctgccacttattactgccagcagtggagttttaacccacccacgttcggtgctgggaccaagctggagctgaaagatggcggtggctcgggcggtggtggatctggaggaggtgggagctctcaggcttatctacagcagtctggggctgagctggtgaggcctggggcctcagtgaagatgtcctgcaaggcttctggctacacatttaccagttacaatatgcactgggtaaagcagacacctagacagggcctggaatggattggagctatttatccaggaaatggtgatacttcctacaatcagaagttcaagggcaaggccacactgactgtagacaaatcctccagcacagcctacatgcagctcagcagcctgacatctgaagactctgcggtctatttctgtgcaagagtggtgtactatagtaactcttactggtacttcgatgtctggggcacagggaccacggtcaccgtctctgatccaagaaggttggacaagatagaagatgaaaggaatcttcatgaagattttgtattcatgaaaacgatacagagatgcaacacaggagaaagatccttatccttactgaactgtgaggagattaaaagccagtttgaaggctttgtgaaggatataatgttaaacaaagaggagacgaagaaagaaaacagctttgaaatgcaaaaaggtgatcagaatcctcaaattgcggcacatgtcataagtgaggccagcagtaaaacaacatctgtgttacagtgggctgaaaaaggatactacaccatgagcaacaacttggtaaccctggaaaatgggaaacagctgaccgttaaaagacaaggactctattatatctatgcccaagtcaccttctgttccaatcgggaagcttcgagtcaagctccatttatagccagcctctgcctaaagtcccccggtagattcgagagaatcttactcagagctgcaaatacccacagttccgccaaaccttgcgggcaacaatccattcacttgggaggagtatttgaattgcaaccaggtgcttcggtgtttgtcaatgtgactgatccaagccaagtgagccatggcactggcttcacgtcctttggcttactcaaactcgagtgataatctaga

SEQ ID NO: 22 - DNA, 1290 bp, Artificial sequence
  2H7scFv-CD154 S4
  misc_feature (13)..(808): Mouse anti-human CD20 scFv
  misc_feature (814)..(1275): Human extracellular domain, short form, CD154
aagcttgccgccatggattttcaagtgcagattttcagcttcctgctaatcagtgcttcagtcataattgccagaggacaaattgttctctcccagtctccagcaatcctgtctgcatctccaggggagaaggtcacaatgacttgcagggccagctcaagtgtaagttacatgcactggtaccagcagaagccaggatcctcccccaaaccctggatttatgccccatccaacctggcttctggagtccctgctcgcttcagtggcagtgggtctgggacctcttactctctcacaatcagcagagtggaggctgaagatgctgccacttattactgccagcagtggagttttaacccacccacgttcggtgctgggaccaagctggagctgaaagatggcggtggctcgggcggtggtggatctggaggaggtgggagctctcaggcttatctacagcagtctggggctgagctggtgaggcctggggcctcagtgaagatgtcctgcaaggcttctggctacacatttaccagttacaatatgcactgggtaaagcagacacctagacagggcctggaatggattggagctatttatccaggaaatggtgatacttcctacaatcagaagttcaagggcaaggccacactgactgtagacaaatcctccagcacagcctacatgcagctcagcagcctgacatctgaagactctgcggtctatttctgtgcaagagtggtgtactatagtaactcttactggtacttcgatgtctggggcacagggaccacggtcaccgtctctgatccagaaaacagctttgaaatgcaaaaaggtgatcagaatcctcaaattgcggcacatgtcataagtgaggccagcagtaaaacaacatctgtgttacagtgggctgaaaaaggatactacaccatgagcaacaacttggtaaccctggaaaatgggaaacagctgaccgttaaaagacaaggactctattatatctatgcccaagtcaccttctgttccaatcgggaagcttcgagtcaagctccatttatagccagcctctgcctaaagtcccccggtagattcgagagaatcttactcagagctgcaaatacccacagttccgccaaaccttgcgggcaacaatccattcacttgggaggagtatttgaattgcaaccaggtgcttcggtgtttgtcaatgtgactgatccaagccaagtgagccatggcactggcttcacgtcctttggcttactcaaactcgagtgataatctaga

SEQ ID NO: 23 - DNA, 43 bp, Artificial sequence
  Oligonucleotide
gtcaagcttgccgccatggattttcaagtgcagatttttcagc

SEQ ID NO: 24 - DNA, 74 bp, Artificial sequence
  Oligonucleotide
gtcgtcgagctcccacctcctccagatccaccaccgcccgagccaccgccacctttcagctccagcttggtccc

SEQ ID NO: 25 - DNA, 37 bp, Artificial sequence
  Oligonucleotide
gctgctgagctctcaggcttatctacagcaagtctgg

SEQ ID NO: 26 - DNA, 32 bp, Artificial sequence
  Oligonucleotide
gttgtctgatcagagacggtgaccgtggtccc

SEQ ID NO: 27 - DNA, 34 bp, Artificial sequence
  Oligonucleotide
gttgtcggatccagaaaacagctttgaaatgcaa

SEQ ID NO: 28 - DNA, 44 bp, Artificial sequence
  Oligonucleotide
gttgtttctagattatcactcgagtttgagtaagccaaaggacg

SEQ ID NO: 29 - DNA, 35 bp, Artificial sequence
  Oligonucleotide
gttgtcggatccaagaaggttggacaagatagaag

SEQ ID NO: 30 - DNA, 23 bp, Artificial sequence
  Oligonucleotide
gtctatataagcagagctctggc

SEQ ID NO: 31 - DNA, 25 bp, Artificial sequence
  Oligonucleotide
cgaggctgatcagcgagctctagca

SEQ ID NO: 32 - DNA, 25 bp, Artificial sequence
  Oligonucleotide
ccgcaatttgaggattctgatcacc

SEQ ID NO: 33 - protein, 483 aa, Artificial sequence
  2H7scFv-CD154 L2
  SITE (1)..(266): Mouse anti-human CD20 scFv
  DOMAIN (268)..(481): Extracellular domain, long form, human CD154
MEDFQVQIFSFLLISASVIIARGQIVLSQSPAILSASPGEKVTMTCRASSSVSYMHWYQQKPGSSPKPWIYAPSNLASGVPARFSGSGSGTSYSLTISRVEAEDAATYYCQQWSFNPPTFGAGTKLELKDGGGSGGGGSGGGGSSQAYLQQSGAELVRPGASVKMSCKASGYTFTSYNMHWVKQTPRQGLEWIGAIYPGNGDTSYNQKFKGKATLTVDKSSSTAYMQLSSLTSEDSAVYFCARVVYYSNSYWYFDVWGTGTTVTVSDPRRLDKIEDERNLHEDFVFMKTIQRCNTGERSLSLLNCEEIKSQFEGFVKDIMLNKEETKKENSFEMQKGDQNPQIAAHVISEASSKTTSVLQWAEKGYYTMSNNLVTLENGKQLTVKRQGLYYIYAQVTFCSNREASSQAPFIASLCLKSPGRFERILLRAANTHSSAKPCGQQSIHLGGVFELQPGASVFVNVTDPSQVSHGTGFTSFGLLKLE

SEQ ID NO: 34 - protein, 422 aa, Artificial sequence
  2H7scFv-CD154 S4
  SITE (1)..(266): Mouse anti-human scFv
  DOMAIN (268)..(421): Extracellular domain, short form, human CD154
MDFQVQIFSFLLISASVIIARGQIVLSQSPAILSASPGEKVTMTCRASSSVSYMHWYQQKPGSSPKPWIYAPSNLASGVPARFSGSGSGTSYSLTISRVEAEDAATYYCQQWSFNPPTFGAGTKLELKDGGGSGGGGSGGGGSSQAYLQQSGAELVRPGASVKMSCKASGYTFTSYNMHWVKQTPRQGLEWIGAIYPGNGDTSYNQKFKGKATLTVDKSSSTAYMQLSSLTSEDSAVYFCARVVYYSNRYWYFDVWGTGTTVTVSDPENSFEMQKGDQNPQIAAHVISEASSKTTSVLQWAEKGYYTMSNNLVTLENGKQLTVKRQGLYYIYAQVTFCSNREASSQAPFIASLCLKSPGRFERILLRAANTHSSAKPCGQQSIHLGGVFELQPGASVFVNVTDPSQVSHGTGFTSFGLLKLE

SEQ ID NO: 35 - DNA, 63 bp, Homo sapiens
  N_region (1)..(63): Portion of human IGA hinge domain conataining only 1 cysteine
ccagttccctcaactccacctaccccatctccctcaactccacctaccccatctccctcatgc

SEQ ID NO: 36 - protein, 21 aa, Homo sapiens
PVPSTPPTPSPSTPPTPSPSC

SEQ ID NO: 37 - DNA, 763 bp, Homo sapiens
  misc_feature (1)..(6): Bcli site for fusion to amin terminal scFvs
  N_region (8)..(752): Wild t ype IGA hinge, CH2, CH3 domains truncated to remove secretory component attachment
tgatcagccagttccctcaactccacctaccccatctccctcaactccacctaccccatctccctcatgctgccacccccgactgtcactgcaccgaccggccctcgaggacctgctcttaggttcagaagcgatcctcacgtgcacactgaccggcctgagagatgcctcaggtgtcaccttcacctggacgccctcaagtgggaagagcgctgttcaaggaccacctgaccgtgacctctgtggctgctacagcgtgtccagtgtcctgccgggctgtgccgagccatggaaccatgggaagaccttcacttgcactgctgcctaccccgagtccaagaccccgctaaccgccaccctctcaaaatccggaaacacattccggcccgaggtccacctgctgccgccgccgtcggaggagctggccctgaacgagctggtgacgctgacgtgcctggcacgtggcttcagccccaaggatgtgctggttcgctggctgcaggggtcacaggagctgccccgcgagaagtacctgacttgggcatcccggcaggagcccagccagggcaccaccaccttcgctgtgaccagcatactgcgcgtggcagccgaggactggaagaagggggacaccttctcctgcatggtgggccacgaggccctgccgctggccttcacacagaagaccatcgaccgcttggcgggtaaacccacccatgtcaatgtgtctgttgtcatggcggaggtggactgataatctaga

SEQ ID NO: 38 - protein, 250 aa, Homo sapiens
  DOMAIN (3)..(250): Truncated form, removal of last three amino acids that mediate attachment to secretory component
DQPVPSTPPTPSPSTPPTPSPSCCHPRLSLHRPALEDLLLGSEAILTCTLTGLRDASGVTFTWTPSSGKSAVQGPPDRDLCGCYSVSSVLPGCAEPWNHGKTFTCTAAYPESKTPLTATLSKSGNTFRPEVHLLPPPSEELALNELVTLTCLARGFSPKDVLVRWLQGSQELPREKWLTWASRQEPSQGTTTFAVTSILRVAAEDWKKGDTFSCMVGHEALPLAFTQKTIDRLAGKPTHVNVSVVMAEVD

SEQ ID NO: 39 - protein, 5 aa, Artificial sequence
  Linker polypeptide
GGGGS

SEQ ID NO: 40 - protein, 4 aa, Artificial sequence
  Core hinge region of human IgG1
CPPC

SEQ ID NO: 41 - protein, 24 aa, Artificial sequence
  Human IgA-derived hinge
PASPSPTPPTSPSPTPPTSPVPQD

SEQ ID NO: 42 - DNA, 1593 bp, Homo sapiens
ccggcgcagcgcggccgcagcagcctccgccccccgcacggtgtgagcgcccgccgcggccgaggcggccggagtcccgagctagccccggcggccgccgccgcccagaccggacgacaggccacctcgtcggcgtccgcccgagtccccgcctcgccgccaacgccacaaccaccgcgcacggccccctgactccgtccagtattgatcgggagagccggagcgagctcttcggggagcagcgatgcgaccctccgggacggccggggcagcgctcctggcgctgctggctgcgctctgcccggcgagtcgggctctggaggaaaagaaagtttgccaaggcacgagtaacaagctcacgcagttgggcacttttgaagatcattttctcagcctccagaggatgttcaataactgtgaggtggtccttgggaatttggaaattacctatgtgcagaggaattatgatctttccttcttaaagaccatccaggaggtggctggttatgtcctcattgccctcaacacagtggagcgaattcctttggaaaacctgcagatcatcagaggaaatatgtactacgaaaattcctatgccttagcagtcttatctaactatgatgcaaataaaaccggactgaaggagctgcccatgagaaatttacaggaaatcctgcatggcgccgtgcggttcagcaacaaccctgccctgtgcaatgtggagagcatccagtggcgggacatagtcagcagtgactttctcagcaacatgtcgatggacttccagaaccacctgggcagctgccaaaagtgtgatccaagctgtcccaatgggagctgctggggtgcaggagaggagaactgccagaaactgaccaaaatcatctgtgcccagcagtgctccgggcgctgccgtggcaagtcccccagtgactgctgccacaaccagtgtgctgcaggctgcacaggcccccgggagagcgactgcctggtctgccgcaaattccgagacgaagccacgtgcaaggacacctgccccccactcatgctctacaaccccaccacgtaccagatggatgtgaaccccgagggcaaatacagctttggtgccacctgcgtgaagaagtgtccccgtaattatgtggtgacagatcacggctcgtgcgtccgagcctgtggggccgacagctatgagatggaggaagacggcgtccgcaagtgtaagaagtgcgaagggccttgccgcaaagtgtgtaacggaataggtattggtgaatttaaagactcactctccataaatgctacgaatattaaacacttcaaaaactgcacctccatcagtggcgatctccacatcctgccggtggcatttaggggtgactccttcacacatactcctcctctggatccacaggaactggatattctgaaaaccgtaaaggaaatcacaggtttgagctgaattatcacatgaatataaatgggaaatcagtgttttagagagagaacttttcgacatatttcctgttcccttggaataaaaacatttcttctgaaattttaccgttaaaaaaaaaaaaaaaaaaaaaaaaa

SEQ ID NO: 43 - protein, 405 aa, Homo sapiens
MRPSGTAGAALLALLAALCPASRALEEKKVCQGTSNKLTQLGTFEDHFLSLQRMFNNCEVVLGNLEITYVQRNYDLSFLKTIQEVAGYVLIALNTVERIPLENLQIIRGNMYYENSYALAVLSNYDANKTGLKELPMRNLQEILHGAVRFSNNPALCNVESIQWRDIVSSDFLSNMSMDFQNHLGSCQKCDPSCPNGSCWGAGEENCQKLTKIICAQQCSGRCRGKSPSDCCHNQCAAGCTGPRESDCLVCRKFRDEATCKDTCPPLMLYNPTTYQMDVNPEGKYSFGATCVKKCPRNYVVTDHGSCVRACGADSYEMEEDGVRKCKKCEGPCRKVCNGIGIGEFKDSLSINATNIKHFKNCTSISGDLHILPVAFRGDSFTHTPPLDPQELDILKTVKEITGLS

SEQ ID NO: 44 - DNA, 4473 bp, Homo sapiens
aaggggaggtaaccctggcccctttggtcggggccccgggcagccgcgcgccccttcccacggggccctttactgcgccgcgcgcccggcccccacccctcgcagcaccccgcgccccgcgccctcccagccgggtccagccggagccatggggccggagccgcagtgagcaccatggagctggcggccttgtgccgctgggggctcctcctcgccctcttgccccccggagccgcgagcacccaagtgtgcaccggcacagacatgaagctgcggctccctgccagtcccgagacccacctggacatgctccgccacctctaccagggctgccaggtggtgcagggaaacctggaactcacctacctgcccaccaatgccagcctgtccttcctgcaggatatccaggaggtgcagggctacgtgctcatcgctcacaaccaagtgaggcaggtcccactgcagaggctgcggattgtgcgaggcacccagctctttgaggacaactatgccctggccgtgctagacaatggagacccgctgaacaataccacccctgtcacaggggcctccccaggaggcctgcgggagctgcagcttcgaagcctcacagagatcttgaaaggaggggtcttgatccagcggaacccccagctctgctaccaggacacgattttgtggaaggacatcttccacaagaacaaccagctggctctcacactgatagacaccaaccgctctcgggcctgccacccctgttctccgatgtgtaagggctcccgctgctggggagagagttctgaggattgtcagagcctgacgcgcactgtctgtgccggtggctgtgcccgctgcaaggggccactgcccactgactgctgccatgagcagtgtgctgccggctgcacgggccccaagcactctgactgcctggcctgcctccacttcaaccacagtggcatctgtgagctgcactgcccagccctggtcacctacaacacagacacgtttgagtccatgcccaatcccgagggccggtatacattcggcgccagctgtgtgactgcctgtccctacaactacctttctacggacgtgggatcctgcaccctcgtctgccccctgcacaaccaagaggtgacagcagaggatggaacacagcggtgtgagaagtgcagcaagccctgtgcccgagtgtgctatggtctgggcatggagcacttgcgagaggtgagggcagttaccagtgccaatatccaggagtttgctggctgcaagaagatctttgggagcctggcatttctgccggagagctttgatggggacccagcctccaacactgccccgctccagccagagcagctccaagtgtttgagactctggaagagatcacaggttacctatacatctcagcatggccggacagcctgcctgacctcagcgtcttccagaacctgcaagtaatccggggacgaattctgcacaatggcgcctactcgctgaccctgcaagggctgggcatcagctggctggggctgcgctcactgagggaactgggcagtggactggccctcatccaccataacacccacctctgcttcgtgcacacggtgccctgggaccagctctttcggaacccgcaccaagctctgctccacactgccaaccggccagaggacgagtgtgtgggcgagggcctggcctgccaccagctgtgcgcccgagggcactgctggggtccagggcccacccagtgtgtcaactgcagccagttccttcggggccaggagtgcgtggaggaatgccgagtactgcaggggctccccagggagtatgtgaatgccaggcactgtttgccgtgccaccctgagtgtcagccccagaatggctcagtgacctgttttggaccggaggctgaccagtgtgtggcctgtgcccactataaggaccctcccttctgcgtggcccgctgccccagcggtgtgaaacctgacctctcctacatgcccatctggaagtttccagatgaggagggcgcatgccagccttgccccatcaactgcacccactcctgtgtggacctggatgacaagggctgccccgccgagcagagagccagccctctgacgtccatcatctctgcggtggttggcattctgctggtcgtggtcttgggggtggtctttgggatcctcatcaagcgacggcagcagaagatccggaagtacacgatgcggagactgctgcaggaaacggagctggtggagccgctgacacctagcggagcgatgcccaaccaggcgcagatgcggatcctgaaagagacggagctgaggaaggtgaaggtgcttggatctggcgcttttggcacagtctacaagggcatctggatccctgatggggagaatgtgaaaattccagtggccatcaaagtgttgagggaaaacacatcccccaaagccaacaaagaaatcttagacgaagcatacgtgatggctggtgtgggctccccatatgtctcccgccttctgggcatctgcctgacatccacggtgcagctggtgacacagcttatgccctatggctgcctcttagaccatgtccgggaaaaccgcggacgcctgggctcccaggacctgctgaactggtgtatgcagattgccaaggggatgagctacctggaggatgtgcggctcgtacacagggacttggccgctcggaacgtgctggtcaagagtcccaaccatgtcaaaattacagacttcgggctggctcggctgctggacattgacgagacagagtaccatgcagatgggggcaaggtgcccatcaagtggatggcgctggagtccattctccgccggcggttcacccaccagagtgatgtgtggagttatggtgtgactgtgtgggagctgatgacttttggggccaaaccttacgatgggatcccagcccgggagatccctgacctgctggaaaagggggagcggctgccccagccccccatctgcaccattgatgtctacatgatcatggtcaaatgttggatgattgactctgaatgtcggccaagattccgggagttggtgtctgaattctcccgcatggccagggacccccagcgctttgtggtcatccagaatgaggacttgggcccagccagtcccttggacagcaccttctaccgctcactgctggaggacgatgacatgggggacctggtggatgctgaggagtatctggtaccccagcagggcttcttctgtccagaccctgccccgggcgctgggggcatggtccaccacaggcaccgcagctcatctaccaggagtggcggtggggacctgacactagggctggagccctctgaagaggaggcccccaggtctccactggcaccctccgaaggggctggctccgatgtatttgatggtgacctgggaatgggggcagccaaggggctgcaaagcctccccacacatgaccccagccctctacagcggtacagtgaggaccccacagtacccctgccctctgagactgatggctacgttgcccccctgacctgcagcccccagcctgaatatgtgaaccagccagatgttcggccccagcccccttcgccccgagagggccctctgcctgctgcccgacctgctggtgccactctggaaaggcccaagactctctccccagggaagaatggggtcgtcaaagacgtttttgcctttgggggtgccgtggagaaccccgagtacttgacaccccagggaggagctgcccctcagccccaccctcctcctgccttcagcccagccttcgacaacctctattactgggaccaggacccaccagagcggggggctccacccagcaccttcaaagggacacctacggcagagaacccagagtacctgggtctggacgtgccagtgtgaaccagaaggccaagtccgcagaagccctgatgtgtcctcagggagcagggaaggcctgacttctgctggcatcaagaggtgggagggccctccgaccacttccaggggaacctgccatgccaggaacctgtcctaaggaaccttccttcctgcttgagttcccagatggctggaaggggtccagcctcgttggaagaggaacagcactggggagtctttgtggattctgaggccctgcccaatgagactctagggtccagtggatgccacagcccagcttggccctttccttccagatcctgggtactgaaagccttagggaagctggcctgagaggggaagcggccctaagggagtgtctaagaacaaaagcgacccattcagagactgtccctgaaacctagtactgccccccatgaggaaggaacagcaatggtgtcagtatccaggctttgtacagagtgcttttctgtttagtttttactttttttgttttgtttttttaaagatgaaataaagacccagggggag

SEQ ID NO: 45 - protein, 1255 aa, Homo sapiens
MELAALCRWGLLLALLPPGAASTQVCTGTDMKLRLPASPETHLDMLRHLYQGCQVVQGNLELTYLPTNASLSFLQDIQEVQGYVLIAHNQVRQVPLQRLRIVRGTQLFEDNYALAVLDNGDPLNNTTPVTGASPGGLRELQLRSLTEILKGGVLIQRSPQLCYQDTILWKDIFHKNNQLALTLIDTNRSRACHPCSPMCKGSRCWGESSEDCQSLTRTVCAGGCARCKGPLPTDCCHEQCAAGCTGPKHSDCLACLHFNHSGICELHCPALVTYNTDTFESMPNPEGRYTFGASCVTACPYNYLSTDVGSCTLVCPLHNQEVTAEDGTQRCEKCSKPCARVCYGLGMEHLREVRAVTSANIQEFAGCKKIFGSLAFLPESFDLDPASNTAPLQPEQLQVFETLEEITGYLYISAWPDSLPDLSVFQNLQVIRGRILHNGAYSLTLQGLGISWLGLRSLRELGSGLALIHHNTHLCFVHTVPWDQLFRNPHQALLHTANRPEDECVGEGLACHQLCARGHCWGPGPTQCVNCSQFLRGQECVEECRVLQGLPREYVNARHCLPCHPECQPQNGSVTCFGPEADQCVACAHYKDPPFCVARCPSGVKPDLSYMPIWKFPDEEGACQPCPINCTHSCVDLDDKGCPAEQRASPLTSIISAVVGILLVVVLGVVFGILIKRRQQKIRKYTMRRLLQETELVEPLTPSGAMPNQAQMRILKETELRKVKVLGSGAFGTVYKGIWIPDGENVKIPVAIKVLRENTSPKANKEILDEAYVMAGVGSPYVSRLLGICLTSTVQLVTQLMPYGCLLDHVRENRGRLGSQDLLNWCMQIAKGMSYLEDVRLVHRDLAARNVLVKSPNHVKITDFGLARLLDIDETEYHADGGKVPIKWMALESILRRRFTHQSDVWSYGVTVWELMTFGAKPYDGIPAREIPDLLEKGERLPQPPICTIDVYMIMVKCWMIDSECRPRFRELVSEFSRMARDPQRFVVIQNEDLGPASPLDSTFYRSLLEDDDMGDLVDAEEYLVPQQGFFCPDPAPGAGGMVHHRHRSSSTRSGGGDLTLGLEPSEEEAPRSPLAPSEGAGSDVFDGDLGMGAAKGLQSLPTHDPSPLQRYSEDPTVPLPSETDGYVAPLTCSPQPEYVNQPDVRPQPPSPREGPLPAARPAGATLERPKTLSPGKNGVVKDVFAFGGAVENPEYLTPQGGAAPQPHPPPAFSPAFDNLYYWDQDPPERGAPPSTFKGTPTAENPEYLGLDVPV

SEQ ID NO: 46 - DNA, 5484 bp, Homo sapiens
aattgtcagcacgggatctgagacttccaaaaaatgaagccggcgacaggactttgggtctgggtgagccttctcgtggcggcggggaccgtccagcccagcgattctcagtcagtgtgtgcaggaacggagaataaactgagctctctctctgacctggaacagcagtaccgagccttgcgcaagtactatgaaaactgtgaggttgtcatgggcaacctggagataaccagcattgagcacaaccgggacctctccttcctgcggtctgttcgagaagtcacaggctacgtgttagtggctcttaatcagtttcgttacctgcctctggagaatttacgcattattcgtgggacaaaactttatgaggatcgatatgccttggcaatatttttaaactacagaaaagatggaaactttggacttcaagaacttggattaaagaacttgacagaaatcctaaatggtggagtctatgtagaccagaacaaattcctttgttatgcagacaccattcattggcaagatattgttcggaacccatggccttccaacttgactcttgtgtcaacaaatggtagttcaggatgtggacgttgccataagtcctgtactggccgttgctggggacccacagaaaatcattgccagactttgacaaggacggtgtgtgcagaacaatgtgacggcagatgctacggaccttacgtcagtgactgctgccatcgagaatgtgctggaggctgctcaggacctaaggacacagactgctttgcctgcatgaatttcaatgacagtggagcatgtgttactcagtgtccccaaacctttgtctacaatccaaccacctttcaactggagcacaatttcaatgcaaagtacacatatggagcattctgtgtcaagaaatgtccacataactttgtggtagattccagttcttgtgtgcgtgcctgccctagttccaagatggaagtagaagaaaatgggattaaaatgtgtaaaccttgcactgacatttgcccaaaagcttgtgatggcattggcacaggatcattgatgtcagctcagactgtggattccagtaacattgacaaattcataaactgtaccaagatcaatgggaatttgatctttctagtcactggtattcatggggacccttacaatgcaattgaagccatagacccagagaaactgaacgtctttcggacagtcagagagataacaggtttcctgaacatacagtcatggccaccaaacatgactgacttcagtgttttttctaacctggtgaccattggtggaagagtactctatagtggcctgtccttgcttatcctcaagcaacagggcatcacctctctacagttccagtccctgaaggaaatcagcgcaggaaacatctatattactgacaacagcaacctgtgttattatcataccattaactggacaacactcttcagcacaatcaaccagagaatagtaatccgggacaacagaaaagctgaaaattgtactgctgaaggaatggtgtgcaaccatctgtgttccagtgatggctgttggggacctgggccagaccaatgtctgtcgtgtcgccgcttcagtagaggaaggatctgcatagagtcttgtaacctctatgatggtgaatttcgggagtttgagaatggctccatctgtgtggagtgtgacccccagtgtgagaagatggaagatggcctcctcacatgccatggaccgggtcctgacaactgtacaaagtgctctcattttaaagatggcccaaactgtgtggaaaaatgtccagatggcttacagggggcaaacagtttcattttcaagtatgctgatccagatcgggagtgccacccatgccatccaaactgcacccaagggtgtaacggtcccactagtcatgactgcatttactacccatggacgggccattccactttaccacaacatgctagaactcccctgattgcagctggagtaattggtgggctcttcattctggtcattgtgggtctgacatttgctgtttatgttagaaggaagagcatcaaaaagaaaagagccttgagaagattcttggaaacagagttggtggaaccattaactcccagtggcacagcacccaatcaagctcaacttcgtattttgaaagaaactgagctgaagagggtaaaagtccttggctcaggtgcttttggaacggtttataaaggtatttgggtacctgaaggagaaactgtgaagattcctgtggctattaagattcttaatgagacaactggtcccaaggcaaatgtggagttcatggatgaagctctgatcatggcaagtatggatcatccacacctagtccggttgctgggtgtgtgtctgagcccaaccatccagctggttactcaacttatgccccatggctgcctgttggagtatgtccacgagcacaaggataacattggatcacaactgctgcttaactggtgtgtccagatagctaagggaatgatgtacctggaagaaagacgactcgttcatcgggatttggcagcccgtaatgtcttagtgaaatctccaaaccatgtgaaaatcacagattttgggctagccagactcttggaaggagatgaaaaagagtacaatgctgatggaggaaagatgccaattaaatggatggctctggagtgtatacattacaggaaattcacccatcagagtgacgtttggagctatggagttactatatgggaactgatgacctttggaggaaaaccctatgatggaattccaacgcgagaaatccctgatttattagagaaaggagaacgtttgcctcagcctcccatctgcactattgacgtttacatggtcatggtcaaatgttggatgattgatgctgacagtagacctaaatttaaggaactggctgctgagttttcaaggatggctcgagaccctcaaagatacctagttattcagggtgatgatcgtatgaagcttcccagtccaaatgacagcaagttctttcagaatctcttggatgaagaggatttggaagatatgatggatgctgaggagtacttggtccctcaggctttcaacatcccacctcccatctatacttccagagcaagaattgactcgaataggagtgaaattggacacagccctcctcctgcctacacccccatgtcaggaaaccagtttgtataccgagatggaggttttgctgctgaacaaggagtgtctgtgccctacagagccccaactagcacaattccagaagctcctgtggcacagggtgctactgctgagatttttgatgactcctgctgtaatggcaccctacgcaagccagtggcaccccatgtccaagaggacagtagcacccagaggtacagtgctgaccccaccgtgtttgccccagaacggagcccacgaggagagctggatgaggaaggttacatgactcctatgcgagacaaacccaaacaagaatacctgaatccagtggaggagaacccttttgtttctcggagaaaaaatggagaccttcaagcattggataatcccgaatatcacaatgcatccaatggtccacccaaggccgaggatgagtatgtgaatgagccactgtacctcaacacctttgccaacaccttgggaaaagctgagtacctgaagaacaacatactgtcaatgccagagaaggccaagaaagcgtttgacaaccctgactactggaaccacagcctgccacctcggagcacccttcagcacccagactacctgcaggagtacagcacaaaatatttttataaacagaatgggcggatccggcctattgtggcagagaatcctgaatacctctctgagttctccctgaagccaggcactgtgctgccgcctccaccttacagacaccggaatactgtggtgtaagctcagttgtggttttttaggtggagagacacacctgctccaatttccccacccccctctctttctctggtggtcttccttctaccccaaggccagtagttttgacacttcccagtggaagatacagagatgcaatgatagttatgtgcttacctaacttgaacattagagggaaagactgaaagagaaagataggaggaaccacaatgtttcttcatttctctgcatgggttggtcaggagaatgaaacagctagagaaggaccagaaaatgtaaggcaatgctgcctactatcaaactagctgtcactttttttctttttctttttctttctttgtttctttcttcctcttctttttttttttttttttaaagcagatggttgaaacacccatgctatctgttcctatctgcaggaactgatgtgtgcatatttagcatccctggaaatcataataaagtttccattagaacaaaagaataacattttctataacatatgatagtgtctgaaattgagaatccagtttctttccccagcagtttctgtcctagcaagtaagaatggccaactcaactttcataatttaaaaatctccattaaagttataactagtaattatgttttcaacactttttggtttttttcattttgttttgctctgaccgattcctttatatttgctcccctatttttggctttaatttctaattgcaaagatgtttacatcaaagcttcttcacagaatttaagcaagaaatattttaatatagtgaaatggccactactttaagtatacaatctttaaaataagaaagggaggctaatatttttcatgctatcaaattatcttcaccctcatcctttacatttttcaacatttttttttctccataaatgacactacttgataggccgttggttgtctgaagagtagaagggaaactaagagacagttctctgtggttcaggaaaactactgatactttcaggggtggcccaatgagggaatccattgaactggaagaaacacactggattgggtatgtctacctggcagatactcagaaatgtagtttgcacttaagctgtaattttatttgttctttttctgaactccattttggattttgaatcaagcaatatggaagcaaccagcaaattaactaatttaagtacatttttaaaaaaagagctaagataaagactgtggaaatgccaaaccaagcaaattaggaaccttgcaacggtatccagggactatgatgagaggccagcacattatcttcatatgtcacctttgctacgcaaggaaatttgttcagttcgtatacttcgtaagaaggaatgcgagtaaggattggcttgaattccatggaatttctagtatgagactatttatatgaagtagaaggtaactctttgcacataaattggtataataaaaagaaaaacacaaacattcaaagcttagggataggtccttgggtcaaaagttgtaaataaatgtgaaacatcttctc

SEQ ID NO: 47 - protein, 1308 aa, Homo sapiens
MKPATGLWVWVSLLVAAGTVQPSDSQSVCAGTENKLSSLSDLEQQYRALRKYYENCEVVMGNLEITSIEHNRDLSFLRSVREVTGYVLVALNQFRYLPLENLRIIRGTKLYEDRYALAIFLNYRKDGNFGLQELGLKNLTEILNGGVYVDQNKFLCYADTIHWQDIVRNPWPSNLTLVSTNGSSGCGRCHKSCTGRCWGPTENHCQTLTRTVCAEQCDGRCYGPYVSDCCHRECAGGCSGPKDTDCFACMNFNDSGACVTQCPQTFVYNPTTFQLEHNFNAKYTYGAFCVKKCPHNFVVDSSSCVRACPSSKMEVEENGIKMCKPCTDICPKACDGIGTGSLMSAQTVDSSNIDKFINCTKINGNLIFLVTGIHGDPYNAIEAIDPEKLNVFRTVREITGFLNIQSWPPNMTDFSVFSNLVTIGGRVLYSGLSLLILKQQGITSLQFQSLKEISAGNIYITDNSNLCYYHTINWTTLFSTINQRIVIRDNRKAENCTAEGMVCNHLCSSDGCWGPGPDQCLSCRRFSRGRICIESCNLYDGEFREFENGSICVECDPQCEKMEDGLLTCHGPGPDNCTKCSHFKDGPNCVEKCPDGLQGANSFIFKYADPDRECHPCHPNCTQGCNGPTSHDCIYYPWTGHSTLPQHARTPLIAAGVIGGLFILVIVGLTFAVYVRRKSIKKKRALRRFLETELVEPLTPSGTAPNQAQLRILKETELKRVKVLGSGAFGTVYKGIWVPEGETVKIPVAIKILNETTGPKANVEFMDEALIMASMDHPHLVRLLGVCLSPTIQLVTQLMPHGCLLEYVHEHKDNIGSQLLLNWCVQIAKGMMWLEERRLVHRDLAARNVLVKSPNHVKITDFGLARLLEGDEKEYNADGGKMPIKWMALECIHWRKFTHQSDVWSYGVTIWELMTFGGKPYDGIPTREIPDLLEKGERLPQPPICTIDVYMVMVKCWMIDADSRPKFKELAAEFSRMARDPQRYLVIQGDDRMKLPSPNDSKFFQNLLDEEDLEDMMDAEEYLVPQAFNIPPPIYTSRARIDSNRSEIGHSPPPAYTPMSGNQFVYRDGGFAAEQLVSVPYRAPTSTIPEAPVAQGATAEIFDDSCCNGTLRKPVAPHVQEDSSTQRYSADPTVFAPERSPRGELDEEGYMTPMRDKPKQEYLNPVEENPFVSRRKNGDLQALDNPEYHNASNGPPKAEDEYVNEPLYLNTFANTLGKAEYLKNNILSMPEKAKKAFDNPDYWNHSLPPRSTLQHPDYLQEYSTKYFYKQNGRIRPIVAENPEYLSEFSLKPGTVLPPPPYRHRNTVV

SEQ ID NO: 48 - DNA, 1593 bp, Homo sapiens; identical to SEQ ID NO: 42

SEQ ID NO: 49 - protein, 405 aa, Homo sapiens
MRPSGTAGAALLALLAALCPASRALEEKKVCQGTSNKLTQLGTFEDHFLSLQRMFNNCEVVLGNLEITYVQRNYDLSFLKTIQEVAGYVLIALNTVERIPLENLQIIRGNMYYENSYALAVLSNYDANKTGLKELPMRNLQEILHGAVRFSNNPALCNVESIQWRDIVSSDFLSNMSMDFQNHLGSCQKCDPSCPNGSCWGAGEGNCQKLTKIICAQQCSGRCRGKSPSDCCHNQCAAGCTGPRESDCLVCRKFRDEATCKDTCPPLMLYNPTTYQMDVNPEGKYSFGATCVKKCPRNYVVTDHGSCVRACGADSYEMEEDGVRKCKKCEGPCRKVCNGIGIGEFKDSLSINATNIKHFKNCTSISGDLHILPVAFRGDSFTHTPPLDPQELDILKTVKEITGLS

SEQ ID NO: 50 - DNA, 990 bp, Homo sapiens
cagtgtgctggcggcccggcgcgagccggcccggccccggtcgggcctccgaaaccatgaactttctgctgtcttgggtgcattggagcctcgccttgctgctctacctccaccatgccaagtggtcccaggctgcacccatggcagaaggaggagggcagaatcatcacgaagtggtgaagttcatggatgtctatcagcgcagctactgccatccaatcgagaccctggtggacatcttccaggagtaccctgatgagatcgagtacatcttcaagccatcctgtgtgcccctgatgcgatgcgggggctgctgcaatgacgagggcctggagtgtgtgcccactgaggagtccaacatcaccatgcagattatgcggatcaaacctcaccaaggccagcacataggagagatgagcttcctacagcacaacaaatgtgaatgcagaccaaagaaagatagagcaagacaagaaaatccctgtgggccttgctcagagcggagaaagcatttgtttgtacaagatccgcagacgtgtaaatgttcctgcaaaaacacagactcgcgttgcaaggcgaggcagcttgagttaaacgaacgtacttgcagatgtgacaagccgaggcggtgagccgggcaggaggaaggagcctccctcagggtttcgggaaccagatctctcaccaggaaagactgatacagaacgatcgatacagaaaccacgctgccgccaccacaccatcaccatcgacagaacagtccttaatccagaaacctgaaatgaaggaagaggagactctgcgcagagcactttgggtccggagggcgagactccggcggaagcattcccgggcgggtgacccagcacggtccctcttggaattggattcgccattttatttttcttgctgctaaatcaccgagcccggaagattagagagttttatttctgggattcctgtagacacaccgcggccgccagcacactg

SEQ ID NO: 51 - protein, 191 aa, Homo sapiens
MNFLLSWVHWSLALLLYLHHAKWSQAAPMAEGGGQNHHEVVKFMDVYQRSYCHPIETLVDIFQEYPDEIEYIFKPSCVPLMRCGGCCNDEGLECVPTEESNITMQIMRIKPHQGQHIGEMSFLQHNKCECRPKKDRARQENPCGPCSERRKHLFVQDPQTCKCSCKNTDSRCKARQLELNERTCRCDKPRR

SEQ ID NO: 52 - DNA, 3166 bp, Homo sapiens
aagagctccagagagaagtcgaggaagagagagacggggtcagagagagcgcgcgggcgtgcgagcagcgaaagcgacaggggcaaagtgagtgacctgcttttgggggtgaccgccggagcgcggcgtgagccctcccccttgggatcccgcagctgaccagtcgcgctgacggacagacagacagacaccgcccccagccccagttaccacctcctccccggccggcggcggacagtggacgcggcggcgagccgcgggcaggggccggagcccgcccccggaggcggggtggagggggtcggagctcgcggcgtcgcactgaaacttttcgtccaacttctgggctgttctcgcttcggaggagccgtggtccgcgcgggggaagccgagccgagcggagccgcgagaagtgctagctcgggccgggaggagccgcagccggaggagggggaggaggaagaagagaaggaagaggagagggggccgcagtggcgactcggcgctcggaagccgggctcatggacgggtgaggcggcggtgtgcgcagacagtgctccagcgcgcgcgctccccagccctggcccggcctcgggccgggaggaagagtagctcgccgaggcgccgaggagagcgggccgccccacagcccgagccggagagggacgcgagccgcgcgccccggtcgggcctccgaaaccatgaactttctgctgtcttgggtgcattggagccttgccttgctgctctacctccaccatgccaagtggtcccaggctgcacccatggcagaaggaggagggcagaatcatcacgaagtggtgaagttcatggatgtctatcagcgcagctactgccatccaatcgagaccctggtggacatcttccaggagtaccctgatgagatcgagtacatcttcaagccatcctgtgtgcccctgatgcgatgcgggggctgctccaatgacgagggcctggagtgtgtgcccactgaggagtccaacatcaccatgcagattatgcggatcaaacctcaccaaggccagcacataggagagatgagcttcctacagcacaacaaatgtgaatgcagaccaaagaaagatagagcaagacaagaaaatccctgtgggccttgctcagagcggagaaagcatttgtttgtacaagatccgcagacgtgtaaatgttcctgcaaaaacacacactcgcgttgcaaggcgaggcagcttgagttaaacgaacgtacttgcagatgtgacaagccgaggcggtgagccgggcaggaggaaggagcctccctcagggtttcgggaaccagatctctctccaggaaagactgatacagaacgatcgatacagaaaccacgctgccgccaccacaccatcaccatcgacagaacagtccttaatccagaaacctgaaatgaaggaagaggagactctgcgcagagcactttgggtccggagggcgagactccggcggaagcattcccgggcgggtgacccagcacggtccctcttggaattggattcgccattttatttttcttgctgctaaatcaccgagcccggaagattagagagttttatttctgggattcctgtagacacacccacccacatacatacatttatatatatatatattatatatatataaaaataaatatctctattttatatatataaaatatatatattctttttttaaattaacagtgctaatgttattggtgtcttcactggatgtatttgactgctgtggacttgagttgggaggggaatgttcccactcagatcctgacagggaagaggaggagatgagagactctggcatgatcttttttttgtcccacttggtggggccagggtcctctcccctgcccaagaatgtgcaaggccagggcatgggggcaaatatgacccagttttgggaacaccgacaaacccagccctggcgctgagcctctctaccccaggtcagacggacagaaagacaaatcacaggttccgggatgaggacaccggctctgaccaggagtttggggagcttcaggacattgctgtgctttggggattccctccacatgctgcacgcgcatctcgcccccaggggcactgcctggaagattcaggagcctgggcggccttcgcttactctcacctgcttctgagttgcccaggaggccactggcagatgtcccggcgaagagaagagacacattgttggaagaagcagcccatgacagcgccccttcctgggactcgccctcatcctcttcctgctccccttcctggggtgcagcctaaaaggacctatgtcctcacaccattgaaaccactagttctgtccccccaggaaacctggttgtgtgtgtgtgagtggttgaccttcctccatcccctggtccttcccttcccttcccgaggcacagagagacagggcaggatccacgtgcccattgtggaggcagagaaaagagaaagtgttttatatacggtacttatttaatatccctttttaattagaaattagaacagttaatttaattaaagagtagggttttttttcagtattcttggttaatatttaatttcaactatttatgagatgtatcttttgctctctcttgctctcttatttgtaccggtttttgtatataaaattcatgtttccaatctctctctccctgatcggtgacagtcactagcttatcttgaacagatatttaattttgctaacactcagctctgccctccccgatcccctggctccccagcacacattcctttgaaagagggtttcaatatacatctacatactatatatatattgggcaacttgtatttgtgtgtatatatatatatatatgtttatgtatatatgtgatcctgaaaaaataaacatcgctattctgttttttatatgttcaaaccaaacaagaaaaaatagagaattctacatactaaatctctctccttttttaattttaatatttgttatcatttatttattggtgctactgtttatccgtaataattgtggggaaaagatattaacatcacgtctttgtctctagtgcagtttttcgagatattccgtagtacatatttatttttaaacaacgacaaagaaatacagatatatcttaaaaaaaaaaaa

SEQ ID NO: 53 - protein, 191 aa, Homo sapiens
MNFLLSWVHWSLALLLYLHHAKWSQAAPMAEGGGQNHHEVVKFMDVYQRSYCHPIETLVDIFQEYPDEIEYIFKPSCVPLMRCGGCSNDEGLECVPTEESNITMQIMRIKPHQGQHIGEMSFLQHNKCECRPKKDRARQENPCGPCSERRKHLFVQDPQTCKCSCKNTHSRCKARQLELNERTCRCDKPRR

SEQ ID NO: 54 - DNA, 725 bp, Homo sapiens
cttcagaagcaatgggaaaaatcagcagtcttccaacccaattatttaagtgctgcttttgtgatttcttgaaggtgaagatgcacaccatgtcctcctcgcatctcttctacctggcgctgtgcctgctcaccttcaccagctctgccacggctggaccggagacgctctgcggggctgagctggtggatgctcttcagttcgtgtgtggagacaggggcttttatttcaacaagcccacagggtatggctccagcagtcggagggcgcctcagacaggtatcgtggatgagtgctgcttccggagctgtgatctaaggaggctggagatgtattgcgcacccctcaagcctgccaagtcagctcgctctgtccgtgcccagcgccacaccgacatgcccaagacccagaaggaagtacatttgaagaacgcaagtagagggagtgcaggaaacaagaactacaggatgtaggaagaccctcctgaggagtgaagagtgacatgccaccgcaggatcctttgctctgcacgagttacctgttaaactttggaacacctaccaaaaaataagtttgataacatttaaaagatgggcgtttcccccaatgaaatacacaagtaaacattccaacattgtctttaggagtgatttgcaccttgcaaaaatggtcctggagttggtagattgctgttgatcttttatcaataatgttctatagaaaag

SEQ ID NO: 55 - protein, 153 aa, Homo sapiens
MGKISSLPTQLFKCCFCDFLKVKMHTMSSSHLFYLALCLLTFTSSATAGPETLCGAELVDALQFVCGDRGFYFNKPTGYGSSSRRAPQTGIVDECCFRSCDLRRLEMYCAPLKPAKSARSVRAQRHTDMPKTQKEVHLKNASRGSAGNKNYRM

SEQ ID NO: 56 - DNA, 8837 bp, Homo sapiens
  misc_feature (238)..(239): n = A, T, C or G
  misc_feature (733)..(733): n = A, T, C or G
  misc_feature (3178)..(3203): n = A, T, C or G
  misc_feature (7393)..(7393): n = A, T, C or G
cccaaccccgcgcacagcgggcactggtttcgggcctctctgtctcctacgaagtccgtagagcaactcggatttgggaaatttctctctagcgttgcccaaacacacttgggtcggccgcgcgccctcaggacgtggacagggagggcttccccgtgtccaggaaagcgaccgggcattgcccccagtctcccccaaatttgggcattgtccccgggtcttccaacggactgggcgnngctcccggacactgaggactggccccggggtctcgctcaccttcagcagcgtccaccgcctgccacagagcgttcgatcgctcgctgcctgagctcctggtgcgcccgcggacgcagcctccagcttcgcggtgagctccccgccgcgccgatcccctccgcctctgcgcccctgaccggctctcggcccgcatctgctgctgtcccgccggtgctggcgctcgtccgctgcgccggggaggccggcgtggggcgcgggacacggctgcggacttgcggctgcgctgcgctcgctcctgctgggcgccccgaaatccgcgccactttcgtttgctcattgcaaagatctcatttgtggggaaagcggctggagggtcccaaagtggggcgggcagggggctggggcgagggacgcggaggagaggcgctcccgccgggcggtaaagtgcctctagcccgcgggcctaggactccgccgggagggcgcgcggagngcgaagtgattgatggcggaagcgggggggcaaggggggcaggggggcgcgggattccgccggcgaccccttccccttggctaggcttaggcggcggggggctggcggggtgcgggattttgtgcgtggtttttgacttggtaaaaatcacagtgctttcttacatcgttcaaactctccaggagatggtttccccagacccccaaattatcgtggtggcccccgagaccgaactcgcgtctatgcaagtccaacgcactgaggacggggtaaccattatccagatattttgggtgggccgcaaaggcgagctacttagacgcaccccggtgagctcggccatgcaggtaggatttgagctgtgtttcccgccctgatcctctctcctctggcggccggagcctccgtaggctccaagcctggcccagattcggcggcgcagccggccttccgcgcgtccgcacctagcgggggctccggggctccggcgcggcaccggggggcgctcgggatctggctgaggctccaaggcccgcgtggccggctcctcctgctggggcaggtggcggctgcgcgccccgcccgagcccaggggccccctcagccgcaacaaccagcaaggaccccccgactcagccccaagccacctgcatctgcactcagacggggcgcacccgcagtgcagcctcctggtggggcgctgggagcccgcctgcccctgcctgcccggagaccccagctcacgagcacaggccgcccgggcaccccagaaacccgggatggggcccctgaattctctaggacgggcattcagcatggccttggcgctctgcggctccctgccccccacccagcctcgcccccgcgcaccccccagcccctgcgaccgccgcccccccccccggggccccagggccccagcccgcaccccccgccccgctcttggctcgggttgcgggggcgggccgggggcggggcgagggctccgcgggcgcccattggcgcgggcgcgaggccagcggccccgcgcggccctgggccgcggctggcgcgactataagagccgggcgtgggcgcccgcagttcgcctgctctccggcggagctgcgtgaggcccggccggccccggccccccccttccggccgcccccgcctcctggcccacgcctgcccgcgctctgcccaccagcgcctccatcgggcaaggcggccccgcgtcgacgccgcccgctgcctcgctgctgactcccgtcccgggcgccgtccgcggggtcgcgctccgccgggcctgcggattccccgccgcctcctcttcatctacctcaactccccccatccccgcttcgcccgaggaggcggttccccccgcaggcagtccggctcgcaggccgccggcgttgtcaccccccccgcgctccccctccagccctccccccggcgcgcagcctcgggccgctcccctttccgcgctgcgtcccggagcggccccggtgccgccaccgcctgtccccctcccgaggcccgggctcgcgacggcagagggctccgtcggcccaaaccgagctgggcgcccgcggtccgggtgcagcctccactccgccccccagtcaccgcctcccccggcccctcgacgtggcgcccttccctccgcttctctgtgctccccgcgcccctcttggcgtctggccccggcccccgctctttctcccgcaaccttcccttcgctccctcccgtcccccccagctcctagcctccgactccctccccccctcacgcccgccctctcgccttcgccgaaccaaagtggattaattacacgctttctgtttctctccgtgctgttctctcccgctgtgcgcctgcccgcctctcgctgtcctctctccccctcgccctctcttcggcccccccctttcacgttcactctgtctctcccactatctctgcccccctctatccttgatacaacagctgacctcatttcccgataccttttcccccccgaaaagtacaacatctggcccgccccagcccgaagacagcccgtcctccctggacaatcagacgaattctccccccccccccaaaaaaaagccatccccccgctctgccccgtcgcacattcggcccccgcgactcggccagagcggcgctggcagaggagtgtccggcaggagggccaacgcccgctgttcggtttgcgacacgcagcagggaggtgggcggcagcgtcgccggcttccaggtaagcggcgtgtgcgggccgggccggggccggggctggggcggcgcgggcttgcggcgacgcccggcccttcctccgcccgctcccggcccggggcctgcggggctcggcggggcggctgagccgggggggaggaggaggaggaggaggaggacggacggctgcgggtcccgttccctgcgcggagcccgcgctaccnnnnnnnnnnnnnnnnnnnnnnnnnngacgtccccgctgaagggggtcggtctgtgggtgcagggggtgccgcctcacatgtgtgattcgtgccttgcgggccctggcctccggggtgctgggtaacgaggaggggcgcggagccgcagaagcccaccctggtgtcgttgacgccggtgccagcgagaccgcgagaggaagacgggggcgggcggggccaggatggagaggggccgagttggcaggagtcatggcagacgccacactcgcgaccatctcccccacacccctctggcctctgtccgcaacatttccaaacaggagtcccgggagagggggagaggggctgctggtctgaggctaagaagggcagagccttcgacccggagagaggccgcggccgcctgccccagtggcaacgttgaagttttccatacaacggaggtcgggaaggagaccccccccccccttcactgccctgtgaagagatgagccgggggtgcaggatgggagcccatggcacttcgctacgggatgtccagggctccggttgggggtgcaggagagaagagactggctgggaggagggagagggcgggagcaaaggcgcgggggtgtggtcagagggagaggggtgggggttaggtggagcccgggctgggaggagtcggctcacacataaaactgaggcactgaccagcctgcaaactggatattagcttctcctgtgaaagagacttccagcttcctcctcctcctcttcctcctcctcctcctgccccagcgagccttctgctgagctgtaggtaaccagggctgtggagtgaaggacccccgctgccatcccactccagcctgaggcagggcagcagggggcacggcccacgcctgggcctcgggccctgcagccgccagcccgctgcctctcggacagcacccccctcccctcttttcctctgcccctgcccccacctggcgtctctgctccctcacctgctccttccctttctgttccttcccttcggccccctccttgcccagctcaggacttttcctgggccctcacctgctccgcaccgctgcatgcttcctgtcctgctttctgccggtcccctgacccggacctccaagcgcagagtggtggggcttgttgcggaagcgcggcgagggctagagtggccagctggcggagtgtgctcttagaatttggaagggggtggcagagggggcggtgagaggactggccagggtccgccatgtcaaggagatgaccaaggaggctttcagatcctcggcgcagtcgcccactagtctttagagagggcatgcaaagttgtgcttctgtcccactgcctgctcagtcgctcacataatttattgcatcaaaaactcccctgggtctgcggagcaaggctggggctgcccgcctggagggtaccaccttctgcaggagcagggccaacttgctgtggtggctcccggcctcccacccccgagtgggtaacccggccctgtgacctgcagcctgtggagggggtgtgcctaagactggcctccccttccagattgtagtctggggaacctggtgtcggacttcccaggtggcctgagctggtctcttcagctccacggggagagtttggtagcgcaaatagggagatgttctgggcccctggccttactggttcgatttgaggcctggaaaggaggctctgggcgtgtgtgtgtgtgtttgggggtacccaaggcagactggagttggagaactgggtgactgggaaaacaaggtttctagagcatgggtggcgtggttgtgttaaccattggagtcgcttgacccaggcctggctcagctgcagactggaaaggtggaaaagccagggggaggggcggggctggcccagcaggactggcctgctgctttgagggcgatggtcctcctggaccccccctgctcagctgggggttgtggggaggaaggggctggtcctccttggagcacatgctctgtaggggtggggctgtctgccatcttggcggcgctggaggcctgagaagtggcgatgtaacgctgggctggccctgcccccatggtgtcataggacggaggcaggtcgggtgtccagcctgggcccctgcagctgtggatgccgctgagctcctgcaataatgaccgtgcagatggtcacccctcgtgtaaaattactagtgcttcttgcaaatggaaggaactgggccttttctgtgtgcttctggacgcttcattctgcacatggccctgcgccctcacctcggcattatgacctgtgtgttacttttgtaataaaaataatgtttataggaaagccgtgctttcaattttcaactgaatttgtaggttggcaaatttggtttgggaggggcacctctggcctggggcttggcctggctgccccgctcacgccacttctctcccgcccccagacaccaatgggaatcccaatggggaagtcgatgctggtgcttctcaccttcttggccttcgcctcgtgctgcattgctgcttaccgccccagtgagaccctgtgcggcggggagctggtggacaccctccagttcgtctgtggggaccgcggcttctacttcagtaagtagcagggaggggcttcctcagacctggtcaggcccctagagtgaccggtgaggatctcccatcctcaagccaggggagcacactcctaggtcagcagcccagccgcttgctctgagactttgaccttcccgccgcgtttctgagcacgtgcggtgtcccagggcatccacaccagctgcctttcccatcacacgcctccttcgaagggtgggccagaggtgccccctagacgtcaggggcatctacaggggtctccctgggcatcagaatttctgttgggggccgtgaggctcctgctcctgaggcaccgcacgcctagtgcagggcttcaggctctggaggaagagcctgcctttcttcctgcaccttttggacattttgacaagggacgtgcgttcggtgaatgatcagaattaaaatcaataaagtgatttatataattaaaatcaataagacaagtgcagttggtgggtggcaggggtgagcggtgcatgcgcctccttgggccccaaggctgccgtggggggtgcccacctgctgacctcaaggacgcttcagcctttcctcatgtttctctcttggttctccagcctgggggctggcaggtgggtgcatggcccattgtccttgagaccccacccccagataggggggctgggtggatgcagaggcaggcatggtgcctgggcatgcctgatggggcaggggaggggccgctccttactggcagaggccgcaacttattccacctgacactcaccacgtgacatctttaccaccactgcttactcacgctgtgaaatgggctcacaggatgcaaatgcacttcaaagcttctctctgaaaagttcctgctgcttgactctggaagcccctgcccgccctggcctctcctgtgccctctctcttgcctgccccatttgggggtaggaagtggcactgcagggcctggtgccagccagtccttgcccagggagaagcttccctgcaccaggctttcctgagaggaggggagggccaagcccccacttgggggcccccgtgacggggcctcctgctccctcctccggctgatggcacctgccctttggcaccccaaggtggagcccccagcgaccttccccttccagctgagcattgctgtgggggagagggggaagacgggaggaaagaagggagtggttccatcacgcctcctcagcctcctctcctcccgtcttctcctctcctgcccttgtctccctgtctcagcagctccaggggtggtgtgggcccctccagcctcccaggtggtgccaggccagagtccaagctcacggacagcagtcctcctgtgggggccctgaactgggctcacatcccacacattttccaaaccactcccattgtgagcctttggtcctggtggtgtccctctggttgtgggaccaagagcttgtgcccatttttcatctgaggaaggaggcagcagaagtcacgggctggtctgggccccactcacctcccctctcacctctcttcttcctgggacgcctctgcctgccggctctcacttccctcccctgacccgcagggtggctgcgnccttccagggcctggcctgagggcaggggtggtttgctgggggttcggcctccgggggctgggggtcggtgcggtgctaacacggctctctctgtgctgtgggacttccaggcaggcccgcaagccgtgtgagccgtcgcagccgtggcatcgttgaggagtgctgtttccgcagctgtgacctggccctcctggagacgtactgtgctacccccgccaagtccgagagggacgtgtcgacccctccgaccgtgcttccggtgagggtcctgggcccctttcccactctctagagacagagaaatagggcttcgggcgcccagcgtttcctgtggcctctgggacctcttggccagggacaaggacccgtgacttccttgcttgctgtgtggcccgggagcagctcagacgctggctccttctgtccctctgcccgtggacattagctcaagtcactgatcagtcacaggggtggcctgtcaggtcaggcgggcggctcaggcggaagagcgtggagagcaggcacctgctgaccagccccttcccctcccaggacaacttccccgagatacccctgggcaagttcttccaatatgacacctggaagcagtccacccagcgcctgcgcaggggcctgcctgccctcctgcgtgcccgccggggtcacgtgctcgccaaggagctcgaggcgttcagggaggccaaacgtcaccgtcccctgattgctctacccacccaagaccccgcccacgggggcgcccccccagagatggccagcaatcggaagtgagcaaaactgccgcaagtctgcagcccggcgccaccatcctgcagcctcctcctgaccacggacgtttccatcaggttccatcccgaaaatctctcggttccacgtcccctggggcttctcctgacccagtccccgtgccccgcctccccgaaacaggctactctcctcggccccctccatcgggctgaggaagcacagcagcatcttcaaacatgtacaaaatcgattggctttaaacacccttcacataccctccccccaaattatccccaattatccccacacataaaaaatcaaaacattaaactaacccccttcccccccccccacaacaaccctcttaaaactaattggctttttagaaacaccccacaaaagctcagaaattggctttaaaaaaaacaaccaccaaaaaaaatcaattggctaaaaaaaaaaagtattaaaaacgaattggctgagaaacaattggcaaaataaaggaatttggcactccccacccccctctttctcttctcccttggactttgagtcaaattggcctggacttgagtccctgaaccagcaaagagaaaagaagggccccagaaatcacaggtgggcacgtcgcgtctaccgccatctcccttctcacgggaattttcagggtaaact

SEQ ID NO: 57 - protein, 180 aa, Homo sapiens [sequence omitted]

SEQ ID NO: 58 - DNA, 5010 bp, Homo sapiens
ggcggctcgggacggaggacgcgctagtgtgagtgcgggcttctagaactacaccgaccctcgtgtcctcccttcatcctgcggggctggctggagcggccgctccggtgctgtccagcagccatagggagccgcacggggagcgggaaagcggtcgcggccccaggcggggcggccgggatggagcggggccgcgagcctgtggggaaggggctgtggcggcgcctcgagcggctgcaggttcttctgtgtggcagttcagaatgatggatcaagctagatcagcattctctaacttgtttggtggagaaccattgtcatatacccggttcagcctggctcggcaagtagatggcgataacagtcatgtggagatgaaacttgctgtagatgaagaagaaaatgctgacaataacacaaaggccaatgtcacaaaaccaaaaaggtgtagtggaagtatctgctatgggactattgctgtgatcgtctttttcttgattggatttatgattggctacttgggctattgtaaaggggtagaaccaaaaactgagtgtgagagactggcaggaaccgagtctccagtgagggaggagccaggagaggacttccctgcagcacgtcgcttatattgggatgacctgaagagaaagttgtcggagaaactggacagcacagacttcaccagcaccatcaagctgctgaatgaaaattcatatgtccctcgtgaggctggatctcaaaaagatgaaaatcttgcgttgtatgttgaaaatcaatttcgtgaatttaaactcagcaaagtctggcgtgatcaacattttgttaagattcaggtcaaagacagcgctcaaaactcggtgatcatagttgataagaacggtagacttgtttacctggtggagaatcctgggggttatgtggcgtatagtaaggctgcaacagttactggtaaactggtccatgctaattttggtactaaaaaagattttgaggatttatacactcctgtgaatggatctatagtgattgtcagagcagggaaaatcacctttgcagaaaaggttgcaaatgctgaaagcttaaatgcaattggtgtgttgatatacatggaccagactaaatttcccattgttaacgcagaactttcattctttggacatgctcatctggggacaggtgacccttacacacctggattcccttccttcaatcacactcagtttccaccatctcggtcatcaggattgcctaatatacctgtccagacaatctccagagctgctgcagaaaagctgtttgggaatatggaaggagactgtccctctgactggaaaacagactctacatgtaggatggtaacctcagaaagcaagaatgtgaagctcactgtgagcaatgtgctgaaagagataaaaattcttaacatctttggagttattaaaggctttgtagaaccagatcactatgttgtagttggggcccagagagatgcatggggccctggagctgcaaaatccggtgtaggcacagctctcctattgaaacttgcccagatgttctcagatatggtcttaaaagatgggtttcagcccagcagaagcattatctttgccagttggagtgctggagactttggatcggttggtgccactgaatggctagagggatacctttcgtccctgcatttaaaggctttcacttatattaatctggataaagcggttcttggtaccagcaacttcaaggtttctgccagcccactgttgtatacgcttattgagaaaacaatgcaaaatgtgaagcatccggttactgggcaatttctatatcaggacagcaactgggccagcaaagttgagaaactcactttagacaatgctgctttccctttccttgcatattctggaatcccagcagtttctttctgtttttgcgaggacacagattatccttatttgggtaccaccatggacacctataaggaactgattgagaggattcctgagttgaacaaagtggcacgagcagctgcagaggtcgctggtcagttcgtgattaaactaacccatgatgttgaattgaacctggactatgagaggtacaacagccaactgctttcatttgtgagggatctgaaccaatacagagcagacataaaggaaatgggcctgagtttacagtggctgtattctgctcgtggagacttcttccgtgctacttccagactaacaacagatttcgggaatgctgagaaaacagacagatttgtcatgaagaaactcaatgatcgtgtcatgagagtggagtatcacttcctctctccctacgtatctccaaaagagtctcctttccgacatgtcttctggggctccggctctcacacgctgccagctttactggagaacttgaaactgcgtaaacaaaataacggtgcttttaatgaaacgctgttcagaaaccagttggctctagctacttggactattcagggagctgcaaatgccctctctggtgacgtttgggacattgacaatgagttttaaatgtgatacccatagcttccatgagaacagcagggtagtctggtttctagacttgtgctgatcgtgctaaattttcagtagggctacaaaacctgatgttaaaattccatcccatcatcttggtactactagatgtctttaggcagcagcttttaatacagggtagataacctgtacttcaagttaaagtgaataaccacttaaaaaatgtccatgatggaatattcccctatctctagaattttaagtgctttgtaatgggaactgcctctttcctgttgttgttaatgaaaatgtcagaaaccagttatgtgaatgatctctctgaatcctaagggctggtctctgctgaaggttgtaagtggttcgcttactttgagtgatcctccaacttcatttgatgctaaataggagataccaggttgaaagacctctccaaatgagatctaagcctttccataaggaatgtagcaggtttcctcattcctgaaagaaacagttaactttcagaagagatgggcttgttttcttgccaatgaggtctgaaatggaggtccttctgctggataaaatgaggttcaactgttgattgcaggaataaggccttaatatgttaacctcagtgtcatttatgaaaagaggggaccagaagccaaagacttagtatattttcttttcctctgtcccttcccccataagcctccatttagttctttgttatttttgtttcttccaaagcacattgaaagagaaccagtttcaggtgtttagttgcagactcagtttgtcagactttaaagaataatatgctgccaaattttggccaaagtgttaatcttaggggagagctttctgtccttttggcactgagatatttattgtttatttatcagtgacagagttcactataaatggtgtttttttaatagaatataattatcggaagcagtgccttccataattatgacagttatactgtcggttttttttaaataaaagcagcatctgctaataaaacccaacagatactggaagttttgcatttatggtcaacacttaagggttttagaaaacagccgtcagccaaatgtaattgaataaagttgaagctaagatttagagatgaattaaatttaattaggggttgctaagaagcgagcactgaccagataagaatgctggttttcctaaatgcagtgaattgtgaccaagttataaatcaatgtcacttaaaggctgtggtagtactcctgcaaaattttatagctcagtttatccaaggtgtaactctaattcccatttgcaaaatttccagtacctttgtcacaatcctaacacattatcgggagcagtgtcttccataatgtataaagaacaaggtagtttttacctaccacagtgtctgtatcggagacagtgatctccatatgttacactaagggtgtaagtaattatcgggaacagtgtttcccataattttcttcatgcaatgacatcttcaaagcttgaagatcgttagtatctaacatgtatcccaactcctataattccctatcttttagttttagttgcagaaacattttgtggtcattaagcattgggtgggtaaattcaaccactgtaaaatgaaattactacaaaatttgaaatttagcttgggtttttgttacctttatggtttctccaggtcctctacttaatgagatagcagcatacatttataatgtttgctattgacaagtcattttaatttatcacattatttgcatgttacctcctataaacttagtgcggacaagttttaatccagaattgaccttttgacttaaagcagagggactttgtatagaaggtttgggggctgtggggaaggagagtcccctgaaggtctgacacgtctgcctacccattcgtggtgatcaattaaatgtaggtatgaataagttcgaagctccgtgagtgaaccatcatataaacgtgtagtacagctgtttgtcatagggcagttggaaacggcctcctagggaaaagttcatagggtctcttcaggttcttagtgtcacttacctagatttacagcctcacttgaatgtgtcactactcacagtctctttaatcttcagttttatctttaatctcctcttttatcttggactgacatttagcgtagctaagtgaaaaggtcatagctgagattcctggttcgggtgttacgcacacgtacttaaatgaaagcatgtggcatgttcatcgtataacacaatatgaatacagggcatgcattttgcagcagtgagtctcttcagaaaacccttttctacagttagggttgagttacttcctatcaagccagtacgtgctaacaggctcaatattcctgaatgaaatatcagactagtgacaagctcctggtcttgagatgtcttctcgttaaggagtagggccttttggaggtaaaggtata

SEQ ID NO: 59 - protein, 760 aa, Homo sapiens
MMDQARSAFSNLFGGEPLSYTRFSLARQVDGDNSHVEMKLAVDEEENADNNTKANVTKPKRCSGSICYGTIAVIVFFLIGFMIGYLGYCKGVEPKTECERLAGTESPVREEPGEDFPAARRLYWDDLKRKLSEKLDSTDFTSTIKLLNENSYVPREAGSQKDENLALYVENQFREFKLSKVWRDQHFVKIQVKDSAQNSVIIVDKNGRLVYLVENPGGYVAYSKAATVTGKLVHANFGTKKDFEDLYTPVNGSIVIVRAGKITFAEKVANAESLNAIGVLIYMDQTKFPIVNAELSFFGHAHLGTGDPYTPGFPSFNHTQFPPSRSSGLPNIPVQTISRAAAEKLFGNMEGDCPSDWKTDSTCRMVTSESKNVKLTVSNVLKEIKILNIFGVIKGFVEPDHYVVVGAQRDAWGPGAAKSGVGTALLLKLAQMFSDMVLKDGFQPSRSIIFASWSAGDFGSVGATEWLEGYLSSLHLKAFTYINLDKAVLGTSNFKVSASPLLYTLIEKTMQNVKHPVTGQFLYQDSNWASKVEKLTLDNAAFPFLAYSGIPAVSFCFCEDTDYPYLGTTMDTYKELIERIPELNKVARAAAEVAGQFVIKLTHDVELNLDYERYNSQLLSFVRDLNQYRADIKEMGLSLQWLYSARGDFFRATSRLTTDFGNAEKTDRFVMKKLNDRVMRVEYHFLSPYVSPKESPFRHVFWGSGSHTLPALLENLKLRKQNNGAFNETLFRNQLALATWTIQGAANALSGDVWDIDNEF

SEQ ID NO: 60 - DNA, 6450 bp, Homo sapiens
gagttgtgcctggagtgatgtttaagccaatgtcagggcaaggcaacagtccctggccgtcctccagcacctttgtaatgcatatgagctcgggagaccagtacttaaagttggaggcccgggagcccaggagctggcggagggcgttcgtcctgggagctgcacttgctccgtcgggtcgccggcttcaccggaccgcaggctcccggggcagggccggggccagagctcgcgtgtcggcgggacatgcgctgcgtcgcctctaacctcgggctgtgctctttttccaggtggcccgccggtttctgagccttctgccctgcggggacacggtctgcaccctgcccgcggccacggaccatgaccatgaccctccacaccaaagcatctgggatggccctactgcatcagatccaagggaacgagctggagcccctgaaccgtccgcagctcaagatccccctggagcggcccctgggcgaggtgtacctggacagcagcaagcccgccgtgtacaactaccccgagggcgccgcctacgagttcaacgccgcggccgccgccaacgcgcaggtctacggtcagaccggcctcccctacggccccgggtctgaggctgcggcgttcggctccaacggcctggggggtttccccccactcaacagcgtgtctccgagcccgctgatgctactgcacccgccgccgcagctgtcgcctttcctgcagccccacggccagcaggtgccctactacctggagaacgagcccagcggctacacggtgcgcgaggccggcccgccggcattctacaggccaaattcagataatcgacgccagggtggcagagaaagattggccagtaccaatgacaagggaagtatggctatggaatctgccaaggagactcgctactgtgcagtgtgcaatgactatgcttcaggctaccattatggagtctggtcctgtgagggctgcaaggccttcttcaagagaagtattcaaggacataacgactatatgtgtccagccaccaaccagtgcaccattgataaaaacaggaggaagagctgccaggcctgccggctccgcaaatgctacgaagtgggaatgatgaaaggtgggatacgaaaagaccgaagaggagggagaatgttgaaacacaagcgccagagagatgatggggagggcaggggtgaagtggggtctgctggagacatgagagctgccaacctttggccaagcccgctcatgatcaaacgctctaagaagaacagcctggccttgtccctgacggccgaccagatggtcagtgccttgttggatgctgagccccccatactctattccgagtatgatcctaccagacccttcagtgaagcttcgatgatgggcttactgaccaacctggcagacagggagctggttcacatgatcaactgggcgaagagggtgccaggctttgtggatttgaccctccatgatcaggtccaccttctagaatgtgcctggctagagatcctgatgattggtctcgtctggcgctccatggagcacccagtgaagctactgtttgctcctaacttgctcttggacaggaaccagggaaaatgtgtagagggcatggtggagatcttcgacatgctgctggctacatcatctcggttccgcatgatgaatctgcagggagaggagtttgtgtgcctcaaatctattattttgcttaattctggagtgtacacatttctgtccagcaccctgaagtctctggaagagaaggaccatatccaccgagtcctggacaagatcacagacactttgatccacctgatggccaaggcaggcctgaccctgcagcagcagcaccagcggctggcccagctcctcctcatcctctcccacatcaggcacatgagtaacaaaggcatggagcatctgtacagcatgaagtgcaagaacgtggtgcccctctatgacctgctgctggagatgctggacgcccaccgcctacatgcgcccactagccgtggaggggcatccgtggaggagacggaccaaagccacttggccactgcgggctctacttcatcgcattccttgcaaaagtattacatcacgggggaggcagagggtttccctgccacagtctgagagctccctggctcccacacggttcagataatccctgctgcattttaccctcatcatgcaccactttagccaaattctgtctcctgcatacactccggcatgcatccaacaccaatggctttctagatgagtggccattcatttgcttgctcagttcttagtggcacatcttctgtcttctgttgggaacagccaaagggattccaaggctaaatctttgtaacagctctctttcccccttgctatgttactaagcgtgaggattcccgtagctcttcacagctgaactcagtctatgggttggggctcagataactctgtgcatttaagctacttgtagagacccaggcctggagagtagacattttgcctctgataagcactttttaaatggctctaagaataagccacagcaaagaatttaaagtggctcctttaattggtgacttggagaaagctaggtcaagggtttattatagcaccctcttgtattcctatggcaatgcatccttttatgaaagtggtacaccttaaagcttttatatgactgtagcagagtatctggtgattgtcaattcacttccccctataggaatacaaggggccacacagggaaggcagatcccctagttggccaagacttattttaacttgatacactgcagattcagagtgtcctgaagctctgcctctggctttccggtcatgggttccagttaattcatgcctcccatggacctatggagagcaacaagttgatcttagttaagtctccctatatgagggataagttcctgatttttgtttttatttttgtgttacaaaagaaagccctccctccctgaacttgcagtaaggtcagcttcaggacctgttccagtgggcactgtacttggatcttcccggcgtgtgtgtgccttacacaggggtgaactgttcactgtggtgatgcatgatgagggtaaatggtagttgaaaggagcaggggccctggtgttgcatttagccctggggcatggagctgaacagtacttgtgcaggattgttgtggctactagagaacaagagggaaagtagggcagaaactggatacagttctgagcacagccagacttgctcaggtggccctgcacaggctgcagctacctaggaacattccttgcagaccccgcattgcctttgggggtgccctgggatccctggggtagtccagctcttattcatttcccagcgtggccctggttggaagaagcagctgtcaagttgtagacagctgtgttcctacaattggcccagcaccctggggcacgggagaagggtggggaccgttgctgtcactactcaggctgactggggcctggtcagattacgtatgcccttggtggtttagagataatccaaaatcagggtttggtttggggaagaaaatcctcccccttcctcccccgccccgttccctaccgcctccactcctgccagctcatttccttcaatttcctttgacctataggctaaaaaagaaaggctcattccagccacagggcagccttccctgggcctttgcttctctagcacaattatgggttacttcctttttcttaacaaaaaagaatgtttgatttcctctgggtgaccttattgtctgtaattgaaaccctattgagaggtgatgtctgtgttagccaatgacccaggtagctgctcgggcttctcttggtatgtcttgtttggaaaagtggatttcattcatttctgattgtccagttaagtgatcaccaaaggactgagaatctgggagggcaaaaaaaaaaaaaaaagtttttatgtgcacttaaatttggggacaattttatgtatctgtgttaaggatatgcttaagaacataattcttttgttgctgtttgtttaagaagcaccttagtttgtttaagaagcaccttatatagtataatatatatttttttgaaattacattgcttgtttatcagacaattgaatgtagtaattctgttctggatttaatttgactgggttaacatgcaaaaaccaaggaaaaatatttagtttttttttttttttttgtatacttttcaagctaccttgtcatgtatacagtcatttatgcctaaagcctggtgattattcatttaaatgaagatcacatttcatatcaacttttgtatccacagtagacaaaatagcactaatccagatgcctattgttggatattgaatgacagacaatcttatgtagcaaagattatgcctgaaaaggaaaattattcagggcagctaattttgcttttaccaaaatatcagtagtaatatttttggacagtagctaatgggtcagtgggttctttttaatgtttatacttagattttcttttaaaaaaattaaaataaaacaaaaaaaatttctaggactagacgatgtaataccagctaaagccaaacaattatacagtggaaggttttacattattcatccaatgtgtttctattcatgttaagatactactacatttgaagtgggcagagaacatcagatgattgaaatgttcgcccaggggtctccagcaactttggaaatctctttgtatttttacttgaagtgccactaatggacagcagatattttctggctgatgttggtattgggtgtaggaacatgatttaaaaaaaaaactcttgcctctgctttcccccactctgaggcaagttaaaatgtaaaagatgtgatttatctggggggctcaggtatggtggggaagtggattcaggaatctggggaatggcaaatatattaagaagagtattgaaagtatttggaggaaaatggttaattctgggtgtgcaccaaggttcagtagagtccacttctgccctggagaccacaaatcaactagctccatttacagccatttctaaaatggcagcttcagttctagagaagaaagaacaacatcagcagtaaagtccatggaatagctagtggtctgtgtttcttttcgccattgcctagcttgccgtaatgattctataatgccatcatgcagcaattatgagaggctaggtcatccaaagagaagaccctatcaatgtaggttgcaaaatctaacccctaaggaagtgcagtctttgatttgatttccctagtaaccttgcagatatgtttaaccaagccatagcccatgccttttgagggctgaacaaataagggacttactgataatttacttttgatcacattaaggtgttctcaccttgaaatcttatacactgaaatggccattgatttaggccactggcttagagtactccttcccctgcatgacactgattacaaatactttcctattcatactttccaattatgagatggactgtgggtactgggagtgatcactaacaccatagtaatgtctaatattcacaggcagatctgcttggggaagctagttatgtgaaaggcaaataaagtcatacagtagctcaaaaggcaaccataattctctttggtgcaagtcttgggagcgtgatctagattacactgcaccattcccaagttaatcccctgaaaacttactctcaactggagcaaatgaactttggtcccaaatatccatcttttcagtagcgttaattatgctctgtttccaactgcatttcctttccaattgaattaaagtgtggcctcgtttttagtcatttaaaattgttttctaagtaattgctgcctctattatggcacttcaattttgcactgtcttttgagattcaagaaaaatttctattcatttttttgcatccaattgtgcctgaacttttaaaatatgtaaatgctgccatgttccaaacccatcgtcagtgtgtgtgtttagagctgtgcaccctagaaacaacatacttgtcccatgagcaggtgcctgagacacagacccctttgcattcacagagaggtcattggttatagagacttgaattaataagtgacattatgccagtttctgttctctcacaggtgataaacaatgctttttgtgcactacatactcttcagtgtagagctcttgttttatgggaaaaggctcaaatgccaaattgtgtttgatggattaatatgcccttttgccgatgcatactattactgatgtgactcggttttgtcgcagctttgctttgtttaatgaaacacacttgtaaacctcttttgcactttgaaaaagaatccagcgggatgctcgagcacctgtaaacaattttctcaacctatttgatgttcaaataaagaattaaact

SEQ ID NO: 61 - protein, 595 aa, Homo sapiens
MTMTLHTKASGMALLHQIQGNELEPLNRPQLKIPLERPLGEVYLDSSKPAVYNYPEGAAYEFNAAAAANAQVYGQTGLPYGPGSEAAAFGSNGLGGFPPLNSVSPSPLMLLHPPPQLSPFLQPHGQQVPYYLENEPSGYTVREAGPPAFYRPNSDNRRQGGRERLASTNDKGSMAMESAKETRYCAVCNDYASGYHYGVWSCEGCKAFFKRSIQGHNDYMCPATNQCTIDKNRRKSCQACRLRKCYEVGMMKGGIRKDRRGGRMLKHKRQRDDGEGRGEVGSAGDMRAANLWPSPLMIKRSKKNSLALSLTADQMVSALLDAEPPILYSEYDPTRPFSEASMMGLLTNLADRELVHMINWAKRVPGFVDLTLHDQVHLLECAWLEILMIGLVWRSMEHPVKLLFAPNLLLDRNQGKCVEGMVEIFDMLLATSSRFRMMNLQGEEFVCLKSIILLNSGVYTFLSSTLKSLEEKDHIHRVLDKITDTLIHLMAKAGLTLQQQHQRLAQLLLILSHIRHMSNKGMEHLYSMKCKNVVPLYDLLLEMLDAHRLHAPTSRGGASVEETDQSHLATAGSTSSHSLQKYYITGEAEGFPATV

SEQ ID NO: 62 - DNA, 5003 bp, Homo sapiens
ggatccattttataagctcaaagataattacttttcagactaagaatatttagggtaaaaagtactgttcaacatctctactgaggatgttatgatgtagcacactctataagctggagctaaaggaaactttccttaaagtgctatttactaaaaattggaacacattccttaagacaaatcgaagtgtggcacacaacatccaaacttccatcatagatacagaggtgttaccatctcccactcccaaatttctttgtcacgctgaggatactcaagaggagcaggacatgttggtcgcagcaggagaaacttgaaagcattcacttttatggaactcataagggagagaatctcttatttagtatcgtccttgatacatttattattttaaaagataatgtagccaaatgtcttcctctgtgttaaatctttacaaaactgaaatcttaaaatggtgacaaaaattctacttctgatagaatctattcatttttccaattagatagggcataattcttaatttgcaaaacaaaacgtaatatgcttatgaggttccatcccaaagaacctgctattgagagtagcattcagaataacgggtggaaatgccaactccagagtttcagatcctaccggtaattggggtagggaggggctttgggcggggcctccctagaggaggaggcgttgttagaaagctgtctggccagtccacagctgtcactaatcggggtaagccttgttgtatttgcgcgtgtgggtggcattctcaatgagaactagcttcacttgtcatttgagtgaaatctacaacccgaggcggctagtgctcccgcactactgggatctgagatcttcggagatgactgtcgcccgcagtacggagccagcagaagtccgacccttcctgggaatgggctgtaccgagaggtccgactagccccagggttttagtgagggggcagtggaactcagcgagggactgagagcttcacagcatgcacgagtttgatgccagagaaaaagtcgggagataaaggagccgcgtgtcactaaattgccgtcgcagccgcagccactcaagtgccggacttgtgagtactctgcgtctccagtcctcggacagaagttggagaactctcttggagaactccccgagttaggagacgagatctcctaacaattactactttttcttgcgctccccacttgccgctcgctgggacaaacgacagccacagttcccctgacgacaggatggaggccaagggcaggagctgaccagcgccgccctcccccgcccccgacccaggaggtggagatcctccggtccagccacattcaacacccactttctcctccctctgcccctatattcccgaaaccccctcctccttcccttttccctcctccctggagacgggggaggagaaaaggggagtccagtcgtcatgactgagctgaaggcaaagggtccccgggctccccacgtggcgggcggcccgccctcccccgaggtcggatccccactgctgtgtcgcccagccgcaggtccgttcccggggagccagacctcggacaccttgcctgaagtttcggccatacctatctccctggacgggctactcttccctcggccctgccagggacaggacccctccgacgaaaagacgcaggaccagcagtcgctgtcggacgtggagggcgcatattccagagctgaagctacaaggggtgctggaggcagcagttctagtcccccagaaaaggacagcggactgctggacagtgtcttggacactctgttggcgccctcaggtcccgggcagagccaacccagccctcccgcctgcgaggtcaccagctcttggtgcctgtttggccccgaacttcccgaagatccaccggctgcccccgccacccagcgggtgttgtccccgctcatgagccggtccgggtgcaaggttggagacagctccgggacggcagctgcccataaagtgctgccccggggcctgtcaccagcccggcagctgctgctcccggcctctgagagccctcactggtccggggccccagtgaagccgtctccgcaggccgctgcggtggaggttgaggaggaggatagctctgagtccgaggagtctgcgggtccgcttctgaagggcaaacctcgggctctgggtggcgcggcggctggaggaggagccgcggcttgtccgccgggggcggcagcaggaggcgtcgccctggtccccaaggaagattcccgcttctcagcgcccagggtcgccctggtggagcaggacgcgccgatggcgcccgggcgctccccgctggccaccacggtgatggatttcatccacgtgcctatcctgcctctcaatcacgccttattggcagcccgcactcggcagctgctggaagacgaaagttacgacggcggggccggggctgccagcgcctttgccccgccgcggacttcaccctgtgcctcgtccaccccggtcgctgtaggcgacttccccgactgcgcgtacccgcccgacgccgagcccaaggacgacgcgtaccctctctatagcgacttccagccgcccgctctaaagataaaggaggaggaggaaggcgcggaggcctccgcgcgctccccgcgttcctaccttgtggccggtgccaaccccgcagccttcccggatttcccgttggggccaccgcccccgctgccgccgcgagcgaccccatccagacccggggaagcggcggtgacggccgcacccgccagtgcctcagtctcgtctgcgtcctcctcggggtcgaccctggagtgcatcctgtacaaagcggagggcgcgccgccccagcagggcccgttcgcgccgccgccctgcaaggcgccgggcgcgagcggctgcctgctcccgcgggacggcctgccctccacctccgcctctgccgccgccgccggggcggcccccgcgctctaccctgcactcggcctcaacgggctcccgcagctcggctaccaggccgccgtgctcaaggagggcctgccgcaggtctacccgccctatctcaactacctgaggccggattcagaagccagccagagcccacaatacagcttcgagtcattacctcagaagatttgtttaatctgtggggatgaagcatcaggctgtcattatggtgtccttacctgtgggagctgtaaggtcttctttaagagggcaatggaagggcagcacaactacttatgtgctggaagaaatgactgcatcgttgataaaatccgcagaaaaaactgcccagcatgtcgccttagaaagtgctgtcaggctggcatggtccttggaggtcgaaaatttaaaaagttcaataaagtcagagttgtgagagcactggatgctgttgctctcccacagccattgggcgttccaaatgaaagccaagccctaagccagagattcactttttcaccaggtcaagacatacagttgattccaccactgatcaacctgttaatgagcattgaaccagatgtgatctatgcaggacatgacaacacaaaacctgacacctccagttctttgctgacaagtcttaatcaactaggcgagaggcaacttctttcagtagtcaagtggtctaaatcattgccaggttttcgaaacttacatattgatgaccagataactctcattcagtattcttggatgagcttaatggtgtttggtctaggatggagatcctacaaacatgtcagtgggcagatgctgtattttgcacctgatctaatactaaatgaacagcggatgaaagaatcatcattctattcattatgccttaccatgtggcagatcccacaggagtttgtcaagcttcaagttagccaagaagagttcctctgtatgaaagtattgttacttcttaatacaattcctttggaagggctacgaagtcaaacccagtttgaggagatgaggtcaagctacattagagagctcatcaaggcaattggtttgaggcaaaaaggagttgtgtcgagctcacagcgtttctatcaacttacaaaacttcttgataacttgcatgatcttgtcaaacagcttcatctgtactgcttgaatacatttatccagtcccgggcactgagtgttgaatttccagaaatgatgtctgaagttattgctgcacaattacccaagatattggcagggatggtgaaaccccttctctttcataaaaagtgaatgtcatctttttcttttaaagaattaaattttgtggcatgtctttttgttttggtcaggattatgaggtcttgagtttttataatgttcttctgaaagccttacatttataacatcatagtgtgtaaatttaaaagaaaaattgtgaggttctaattattttcttttataaagtataattagaatgtttaactgttttgtttacccatattttcttgaagaatttacaagattgaaaaagtactaaaattgttaaagtaaactatatcttatccatattatttcataccatgtaggtgaggatttttaacttttgcatctaacaaatcatcgacttaagagaaaaaatcttacatgtaataacacaaagctattatatgttatttctaggtaactccctttgtgtcaattatatttccaaaaatgaacctttaaaatggtatgcaaaattttgtctatatatatttgtgtgaggaggaaattcataactttcctcagattttcaaaagtatttttaatgcaaaaaatgtagaaagagtttaaaaccactaaaatagattgatgttcttcaaactaggcaaaacaactcatatgttaagaccattttccagattggaaacacaaatctcttaggaagttaataagtagattcatatcattatacaaatagtattgtgggttttgtaggtttttaaaataaccttttttggggagagaattgtcctctaatgaggtattgcgagtggc

SEQ ID NO: 63 - protein, 933 aa, Homo sapiens
MTELKAKGPRAPHVAGGPPSPEVGSPLLCRPAAGPFPGSQTSDTLPEVSAIPISLDGLLFPRPCQGQDPSDEKTQDQQSLSDVEGAYSRAEATRGAGGSSSSPPEKDSGLLDSVLDTLLAPSGPGQSQPSPPACEVTSSWCLFGPELPEDPPAAPATQRVLSPLMSRSGCKVGDSSGTAAAHKVLPRGLSPARQLLLPASESPHWSGAPVKPSPQAAAVEVEEEDSSESEESAGPLLKGKPRALGGAAAGGGAAACPPGAAAGGVALVPKEDSRFSAPRVALVEQDAPMAPGRSPLATTVMDFIHVPILPLNHALLAARTRQLLEDESYDGGAGAASAFAPPRTSPCASSTPVAVGDFPDCAYPPDAEPKDDAYPLYSDFQPPALKIKEEEEGAEASARSPRSYLVAGANPAAFPDFPLGPPPPLPPRATPSRPGEAAVTAAPASASVSSASSSGSTLECILYKAEGAPPQQGPFAPPPCKAPGASGCLLPRDGLPSTSASAAAAGAAPALYPALGLNGLPQLGYQAAVLKEGLPQVYPPYLNYLRPDSEASQSPQYSFESLPQKICLICGDEASGCHYGVLTCGSCKVFFKRAMEGQHNYLCAGRNDCIVDKIRRKNCPACRLRKCCQAGMVLGGRKFKKFNKVRVVRALDAVALPQPLGVPNESQALSQRFTFSPGQDIQLIPPLINLLMSIEPDVIYAGHDNTKPDTSSSLLTSLNQLGERQLLSVVKWSKSLPGFRNLHIDDQITLIQYSWMSLMVFGLGWRSYKHVSGQMLYFAPDLILAEQRMKESSFYSLCLTMWQIPQEFVKLQVSQEEFLCMKVLLLLNTIPLEGLRSQTQFEEMRSSYIRELIKAIGLRQKGVVSSSQRFYQLTKLLDNLHDLVKQLHLYCLNTFIQSRALSVEFPEMMSEVIAAQLPKILAGMVKPLLFHKK

SEQ ID NO: 64 - DNA, 2393 bp, Homo sapiens
cgctgagatctgtggaggtttttctctgcaaatgcagaaagaaatcaggtggatggatgcataattatggccctgctcctggtctctttgctggcattcctgagcttgggctcaggatgtcatcatcggatctgtcactgctctaacagggtttttctctgccaagagagcaaggtgacagagattccttctgacctcccgaggaatgccattgaactgaggtttgtcctcaccaagcttcgagtcatccaaaaaggtgcattttcaggatttggggacctggagaaaatagagatctctcagaatgatgtcttggaggtgatagaggcagatgtgttctccaaccttcccaaattacatgaaattagaattgaaaaggccaacaacctgctctacatcacccctgaggccttccagaaccttcccaaccttcaatatctgttaatatccaacacaggtattaagcaccttccagatgttcacaagattcattctctccaaaaggttttacttgacattcaagataacataaacatccacacaattgaaagaaattctttcgtggggctgagctttgaaagtgtgattctatggctgaataagaatgggattcaagaaatacacaactgtgcattcaatggaacccaactagatgcagtgaatctaagcgataataataatttagaagaattgcctaatgatgttttccacggagcctctggaccagtcattctagatatttcaagaacaaggatccattccctgcctagctatggcttagaaaatcttaagaagctgagggccaggtcgacttacaacttaaaaaagctgcctactctggaaaagcttgtcgccctcatggaagccagcctcacctatcccagccattgctgtgcctttgcaaactggagacggcaaatctctgagcttcatccaatttgcaacaaatctattttaaggcaagaagttgattatatgactcaggctaggggtcagagatcctctctggcagaagacaatgagtccagctacagcagaggatttgacatgacgtacactgagtttgactatgacttatgcaatgaagtggttgacgtgacctgctcccctaagccagatgcattcaacccatgtgaagatatcatggggtacaacatcctcagagtcctgatatggtttatcagcatcctggccatcactgggaacatcatagtgctagtgatcctaactaccagccaatataaactcacagtccccaggttccttatgtgcaacctggcctttgctgatctctgcattggaatctacctgctgctcattgcatcagttgatatccataccaagagccaatatcacaactatgccattgactggcaaactggggcaggctgtgatgctgctggctttttcactgtctttgccagtgagctgtcagtctacactctgacagctatcaccttggaaagatggcataccatcacgcatgccatgcagctggactgcaaggtgcagctccgccatgctgccagtgtcatggtgatgggctggatttttgcttttgcagctgccctctttcccatctttggcatcagcagctacatgaaggtgagcatctgcctgcccatggatattgacagccctttgtcacagctgtatgtcatgtccctccttgtgctcaatgtcctggcctttgtggtcatctgtggctgctatatccacatctacctcacagtgcggaaccccaacatcgtgtcctcctctagtgacaccaggatcgccaagcgcatggccatgctcatcttcactgacttcctctgcatggcacccatttctttctttgccatttctgcctccctcaaggtgcccctcatcactgtgtccaaagcaaagattctgctggttctgtttcaccccatcaactcctgtgccaaccccttcctctatgccatctttaccaaaaactttcgcagagatttcttcattctgctgagcaagtgtggctgctatgaaatgcaagcccaaatttataggacagaaacttcatccactgtccacaacacccatccaaggaatggccactgctcttcagctcccagagtcaccagtggttccacttacatacttgtccctctaagtcatttagcccaaaactaaaacacaatgtgaaaatgtatctgagtattgaatgataattcagtccttgcctttgaagggtatgtcacaaggagctgacagtgcttctacacatttcatctaatttaatattcctggcatacctttaaggtaaattggtcaggaactattaattccatgtgatacattaggaagctgaattattagtaacaacaataataattaaagaatgcaatactgtaaaaaagcggccgcgaatt

SEQ ID NO: 65 - protein, 695 aa, Homo sapiens
MALLLVSLLAFLSLGSGCHHRICHCSNRVFLCQESKVTEIPSDLPRNAIELRFVLTKLRVIQKGAFSGFGDLEKIEISQNDVLEVIEADVFSNLPKLHEIRIEKANNLLYITPEAFQNLPNLQYLLISNTGIKHLPDVHKIHSLQKVLLDIQDNINIHTIERNSFVGLSFESVILWLNKNGIQEIHNCAFNGTQLDAVNLSDNNNLEELPNDVFHGASGPVILDISRTRIHSLPSYGLENLKKLRARSTYNLKKLPTLEKLVALMEASLTYPSHCCAFANWRRQISELHPICNKSILRQEVDYMTQARGQRSSLAEDNESSYSRGFDMTYTEFDYDLCNEVVDVTCSPKPDAFNPCEDIMGYNILRVLIWFISILAITGNIIVLVILTTSQYKLTVPRFLMCNLAFADLCIGIYLLLIASVDIHTKSQYHNYAIDWQTGAGCDAAGFFTVFASELSVYTLTAITLERWHTITHAMQLDCKVQLRHAASVMVMGWIFAFAAALFPIFGISSYMKVSICLPMDIDSPLSQLWVMSLLVLNVLAFVVICGCYIHIYLTVRNPNIVSSSSDTRIAKRMAMLIFTDFLCMAPISFFAISASLKVPLITVSKAKILLVLFHPINSCANPFLYAIFTKNFRRDFFILLSKCGCYEMQAQIYRTETSSTVHNTHPRNGHCSSAPRVTSGSTYILVPLSHLAQN

SEQ ID NO: 66 - DNA, 1920 bp, Homo sapiens
aattccctcctggagcccccaccctagctgggggccaggtgggttgggggatgtctcaagagccggtcctttggtcaagcagttctgtgagctggcacttttcctgggaaggtccagagctggccttcagggcaccaaaaaagatgccactcctagatgggccccagctaggtggctgagggggccatgtcctgtgatgctcgcagcgggggaagcaacccgttcggggtgccagcgagcacagcgtctgccctaacccgggggcgggcacctcaatgggtacccggtgcctccctacgccttcttcttcccccctatgctgggtggactctccccgccaggcgctctgaccactctccagcaccagcttccagttagtggatatagcacaccatccccagccaccattgagacccagagcagcagttctgaagagatagtgcccagccctccctcgccaccccctctaccccgcatctacaagccttgctttgtctgtcaggacaagtcctcaggctaccactatggggtcagcgcctgtgagggctgcaagggcttcttccgccgcagcatccagaagaacatggtgtacacgtgtcaccgggacaagaactgcatcatcaacaaggtgacccggaaccgctgccagtactgccgactgcagaagtgctttgaagtgggcatgtccaaggagtctgtgagaaacgaccgaaacaagaagaagaaggaggtgcccaagcccgagtgctctgagagctacacgctgacgccggaggtgggggagctcattgagaaggtgcgtaaagcgcaccaggaaaccttccctgccctctgccagctgggcaaatacactacgaacaacagctcagaacaacgtgtctctctggacattgacctctgggacaagttcagtgaactctccaccaagtgcatcattaagactgtggagttcgccaagcagctgcccggcttcaccaccctcaccatcgccgaccagatcaccctcctcaaggctgcctgcctggacatcctgatcctgcggatctgcacgcggtacacgcccgagcaggacaccatgaccttctcggacgggctgaccctgaaccggacccagatgcacaacgctggcttcggccccctcaccgacctggtctttgccttcgccaaccagctgctgcccctggagatggatgatgcggagacggggctgctcagcgccatctgcctcatctgcggagaccgccaggacctggagcagccggaccgggtggacatgctgcaggagccgctgctggaggcgctaaaggtctacgtgcggaagcggaggcccagccgcccccacatgttccccaagatgctaatgaagattactgacctgcgaagcatcagcgccaagggggctgagcgggtgatcacgctgaagatggagatcccgggctccatgccgcctctcatccaggaaatgttggagaactcagagggcctggacactctgagcggacagccggggggtggggggcgggacgggggtggcctggcccccccgccaggcagctgtagccccagcctcagccccagctccaacagaagcagcccggccacccactccccgtgaccgcccacgccacatggacacagccctcgccctccgccccggcttttctctgcctttctaccgaccatgtgaccccgcaccagccctgcccccacctgccctgcccgggagtactggggaccttccctgggggacggggagggaggaggcagcgactccttggacagaggcctgggccctcagtggactgcctgctcccacagcctgggctgacgtcagaggccgaggccaggaactgagtgaggcccctggtcctgggtctcaggatgggtcctgggggcctcgtgttcatcaagacggaattc

SEQ ID NO: 67 - protein, 432 aa, Homo sapiens
MLGGLSPPGALTTLQHQLPVSGYSTPSPATIETQSSSSEEIVPSPPSPPPLPRIYKPCFVCQDKSSGYHYGVSACEGCKGFFRRSIQKNMVYTCHRDKNCIINKVTRNRCQYCRLQKCFEVGMSKESVRNDRNKKKKEVPKPECSESYTLTPEVGELIEKVRKAHQETFPALCQLGKYTTNNSSEQRVSLDIDLWDKFSELSTKCIIKTVEFAKQLPGFTTLTIADQITLLKAACLDILILRICTRYTPEQDTMTFSDGLTLNRTQMHNAGFGPLTDLVFAFANQLLPLEMDDAETGLLSAICLICGDRQDLEQPDRVDMLQEPLLEALKVYVRKRRPSRPHMFPKMLMKITDLRSISAKGAERVITLKMEIPGSMPPLIQEMLENSEGLDTLSGQPGGGGRDGGGLAPPPGSCSPSLSPSSNRSSPATHSP

SEQ ID NO: 68 - DNA, 3576 bp, Homo sapiens
ctaaaactagcgacctgtccactattatccagcccccttatgtcctctcaacttgtgagaagtggtgttcaaggacccgcagagagaataggaaaagggatcgggggacctagggatggacttcccatgtcttgctgtccagggcctttctgtgtttcctttcctcttcttggcggtcactctgggactaaaaccagagccagggggccccaggtttcctccacatacacacctggggtagtcaaggagcggttggtaaaagtgggaggccagatggagaaaaaacaggttgtcataaggttgagtgattggagcccaagtaccctacacaggaatgactggtggggggaggaggaggaaaagataggggagggggcggagttttgttacctgtcacctgctctgactgtgcctagggcgggagggggactggtataaagcagcaggcaccagccctgttccacctcacacacggagcgccagccttgagtttgttttctagccccttcccgcctgttcaccaccaccatgaccccgggcattcgggctcctttcttcctgctgctacttctagcaagtctaaaaggtgagaggcgcaaggtggggaggggctgcgctgttcaggtgggactcccagtctttctgtggagtttgcttactggtagattatgagagtcataaatggccatccatacaggtatggcccagtatgtgccaggggggaaaagaggctaaggaaggaggctgagaagaggtgacccctcaggagagtgggcactatagtaggcaaataatactctttgtggggagtagagaagagaggctgtgtcaggagaatgagctccggagtggaagaatggggccgtgtgcagtggttccagtctatagttcccacaccctggacgctcaggttcacagagagttcaaggccagcttaggctacagtatgaatacttgtctcaagtagaggaataaatgagccagaagcagaggtgagacctctgcttagggagggaggctgtcaggatgaaggcaaaccaggggctacctgatgctaacatgatcccccttccttccccggttactttgttttcagagtttatatttttcttcttgctctgatttttattcatcaacccagtaggtttttttttttttgttgttgttgttttgttttttttttcttcaactttggctctagccggaactaaaacatcacacatgttatccaaagcgacccagtgtccaactctgttgattagtgctgcgctgctgtgagcataaaaacagtttacccctaatcttccactctggttcaggttttcttgcccttccaagtgaggaaaacagtgtcacctcatctcaggacaccagcagttccttagcatcgactaccactccagtccacagcagcaactcagacccagccaccagacctccaggggactccaccagctctccagtccagagtagcacctcttctccagccaccagagctcctgaagactctaccagtactgcagtcctcagtggcacctcctccccagccaccacagctccagtgaactccgccagctctccagtagcccatggtgacacctcttccccagccactagccctttaaaagactccaacagctctccagtagtccacagtggcacctcttcagctgccaccacagctccagtggattccaccagctctccagtagtccacggtggtacctcgtccccagccaccagccctccaggggactccaccagctctccagaccatagtagcacctcttctccagccaccagagctcccgaagactctaccagtactgcagtcctcagtggcacctcctccccagccaccacagctccagtggactccaccagctctccagtagcccatgatgacacctcttccccagccactagcctttcagaagactccgccagctctccagtagcccacggtggcacctcttctccagccaccagccctctaagggactccaccagttctccagttcacagtagtgcctccatccaaaacatcaagactacatcagacttagctagcactccagaccacaatggcacctcagtcacaactaccagctctgcactgggctcagccaccagtccagaccacagtggtacctcaactacaactaacagctctgaatcagtcttggccaccactccagtttacagtagcatgccattctctactaccaaagtgacgtcaggctcagctatcattccagaccacaatggctcctcggtgctacctaccagttctgtgttgggctcagctaccagtctagtctataatacctctgcaatagctacaactccagtcagcaatggcactcagccttcagtgccaagtcaataccctgtttctcctaccatggccaccacctccagccacagcactattgccagcagctcttactatagcacagtaccattttctaccttctccagtaacagttcaccccagttgtctgttggggtctccttcttcttcttgttcttttacattcaaaaccacccatttaattcttctctggaagaccccagctccaactactaccaagaactgaagaggaacatttctggattggtgggtatcagcctagcctctgccatgtgtcccctgacgtagctcttcaggactgcatggctttcacatcactcctgagtcttctcctcttctcccagtttctgcagatttttaacggagattttctggggatctctagcatcaagttcaggtacgttctggatttgacttgggggaggaatggtcagtctcgtgactttgtggtgtcgggatgggggtggggtggggagaggagtgctgagctataagctcagtctatctgagctccctatttcctgtgaccaggtcaggctccgtggtggtagaatcgactgtggttttccgggagggtacttttagtgcctctgacgtgaagtcacagcttatacagcataagaaggaggcagatagctataatctgactatttcagaagtcaaaggtgaggtgatagccccagctgcagcctggcaccatactatggggctttaccacctgtttacttctggcgccaggagtgggaaatccacctcccttggggacttccctgaccaccgctttcccttctagtgaatgagatgcagttccctccctctgcccagtcccggccgggggtaccaggctggggcattgccctgctggtgctggtctgtattttggttgctttggctatcgtctatttccttgccctggtaagtctcaagccttctgcggcgcggtgtgcccttggtaaatggaaggggactggccaatccaatctcctgtctccctaggcagtgtgccagtgccgccgaaagagctatgggcagctggacatctttccaacccaggacacctaccatcctatgagtgaataccctacctaccacactcacggacgctacgtgccccctggcagtaccaagcgtcagccctatgaggaggtaaagtgtatcccgaagaagcttgggccatcgacctgggcagggtggggccttct

SEQ ID NO: 69 - protein, 630 aa, Homo sapiens
MTPGIRAPFFLLLLLASLKGFLALPSEENSVTSSQDTSSSLASTTTPVHSSNSDPATRPPGDSTSSPVQSSTSSPATRAPEDSTSTAVLSGTSSPATTAPVNSASSPVAHGDTSSPATSPLKDSNSSPVVHSGTSSAATTAPVDSTSSPVVHGGTSSPATSPPGDSTSSPDHSSTSSPATRAPEDSTSTAVLSGTSSPATTAPVDSTSSPVAHDDTSSPATSLSEDSASSPVAHGGTSSPATSPLRDSTSSPVHSSASIQNIKTTSDLASTPDHNGTSVTTTSSALGSATSPDHSGTSTTTNSSESVLATTPVYSSMPFSTTKVTSGSAIIPDHNGSSVLPTSSVLGSATSLVYNTSAIATTPVSNGTQPSVPSQYPVSPTMATTSSHSTIASSSYYSTVPFSTFSSNSSPQLSVGVSFFFLFFYIQNHPFNSSLEDPSSNYYQELKRNISGLFLQIFNGDFLGISSIKFRSGSVVVESTVVFREGTFSASDVKSQLIQHKKEADSYNLTISEVKVNEMQFPPSAQSRPGVPGWGIALLVLVCILVALAIVYFLALAVCQCRRKSYGQLDIFPTQDTYHPMSEYPTYHTHGRYVPPGSTKRQPYEEVSAGNGSSSLSYTNPAVVTTSANL

SEQ ID NO: 70 - DNA, 755 bp, Homo sapiens
ctcgtgggccctgaccttctctctgagagccgggcagaggctccggagccatgcaggccgaaggccggggcacagggggttcgacgggcgatgctgatggcccaggaggccctggcattcctgatggcccagggggcaatgctggcggcccaggagaggcgggtgccacgggcggcagaggtccccggggcgcaggggcagcaagggcctcggggccgggaggaggcgccccgcggggtccgcatggcggcgcggcttcagggctgaatggatgctgcagatgcggggccagggggccggagagccgcctgcttgagttctacctcgccatgcctttcgcgacacccatggaagcagagctggcccgcaggagcctggcccaggatgccccaccgcttcccgtgccaggggtgcttctgaaggagttcactgtgtccggcaacatactgactatccgactgactgctgcagaccaccgccaactgcagctctccatcagctcctgtctccagcagctttccctgttgatgtggatcacgcagtgctttctgcccgtgtttttggctcagcctccctcagggcagaggcgctaagcccagcctggcgccccttcctaggtcatgcctcctcccctagggaatggtcccagcacgagtggccagttcattgtgggggcctgattgtttgtcgctggaggaggacggcttacatgtttgtttctgtagaaaataaaactgagctacgaaaaaaaaaaa

SEQ ID NO: 71 - protein, 180 aa, Homo sapiens
MQAEGRGTGGSTGDADGPGGPGIPDGPGGNAGGPGEAGATGGRGPRGAGAARASGPGGGAPRGPHGGAASGLNGCCRCGARGPESRLLEFYLAMPFATPMEAELARRSLAQDAPPLPVPGVLLKEFTVSGNILTIRLTAADHRQLQLSISSCLQQLSLLMWITQCFLPVFLAQPPSGQRR

SEQ ID NO: 72 - DNA, 1524 bp, Homo sapiens
agcagacagaggactctcattaaggaaggtgtcctgtgccctgaccctacaagatgccaagagaagatgctcacttcatctatggttaccccaagaaggggcacggccactcttacaccacggctgaagaggccgctgggatcggcatcctgacagtgatcctgggagtcttactgctcatcggctgttggtattgtagaagacgaaatggatacagagccttgatggataaaagtcttcatgttggcactcaatgtgccttaacaagaagatgcccacaagaagggtttgatcatcgggacagcaaagtgtctcttcaagagaaaaactgtgaacctgtggttcccaatgctccacctgcttatgagaaactctctgcagaacagtcaccaccaccttattcaccttaagagccagcgagacacctgagacatgctgaaattatttctctcacacttttgcttgaatttaatacagacatctaatgttctcctttggaatggtgtaggaaaaatgcaagccatctctaataataagtcagtgttaaaattttagtaggtccgctagcagtactaatcatgtgaggaaatgatgagaaatattaaattgggaaaactccatcaataaatgttgcaatgcatgatactatctgtgccagaggtaatgttagtaaatccatggtgttattttctgagagacagaattcaagtgggtattctggggccatccaatttctctttacttgaaatttggctaataacaaactagtcaggttttcgaaccttgaccgacatgaactgtacacagaattgttccagtactatggagtgctcacaaaggatacttttacaggttaagacaaagggttgactggcctatttatctgatcaagaacatgtcagcaatgtctctttgtgctctaaaattctattatactacaataatatattgtaaagatcctatagctctttttttttgagatggagtttcgcttttgttgcccaggctggagtgcaatggcgcgatcttggctcaccataacctccgcctcccaggttcaagcaattctcctgccttagcctcctgagtagctgggattacaggcgtgcgccactatgcctgactaattttgtagttttagtagagacggggtttctccatgttggtcaggctggtctcaaactcctgacctcaggtgatctgcccgcctcagcctcccaaagtgctggaattacaggcgtgagccaccacgcctggctggatcctatatcttaggtaagacatataacgcagtctaattacatttcacttcaaggctcaatgctattctaactaatgacaagtattttctactaaaccagaaattggtagaaggatttaaataagtaaaagctactatgtactgccttagtgctgatgcctgtgtactgccttaaatgtacctatggcaatttagctctcttgggttcccaaatccctctcacaagaatgtgcagaagaaatcataaaggatcagagattctg

SEQ ID NO: 73 - protein, 118 aa, Homo sapiens
MPREDAHFIYGYPKKGHGHSYTTAEEAAGIGILTVILGVLLLIGCWYCRRRNGYRALMDKSLHVGTQCALTRRCPQEGFDHRDSKVSLQEKNCEPVVPNAPPAYEKLSAEQSPPPYSP

SEQ ID NO: 74 - DNA, 1602 bp, Homo sapiens
atgttcttggctgttttgtattgccttctgtggagtttccagatctctgatggccattttcctcgagcctgtgcctcctctaagaacttgttggcaaaagaatgctgcccaccatggatcggtgatgggagtccctgcggccagctttcaggcagaggttcctgccaggatatccttctgtccagtgcaccatctggacctcagttccccttcaaaggggtggatgaccgtgagtcctggccctctgtgttttataataggacctgccagtgctcaggcaacttcatgggtttcaactgcggaaactgtaagtttggatttgggggcccaaattgtacagagaagcgagtcttgattagaagaaacatttttgatttgagtgtctccgaaaagaataagttcttttcttacctcactttagcaaaacatactatcagctcagtctatgtcatccccacaggcacctatggccaaatgaacaatgggtcaacacccatgtttaatgatatcaacatctacgacctctttgtatggatgcattactatgtgtcaagggacacactgcttgggggctctgaaatatggaggcagattgattttgcccatgaagcaccagggtttctgccttggcacagacttttcttgttattgtgggaacaagaaattcgagaactaactggggatgagaacttcactgttccatactgggattggagagatgcagaaaactgtgacatttgcacagatgagtacttgggaggtcgtcaccctgaaaatcctaacttactcagcccagcatccttcttctcctcctggcagatcatttgtagcagatcagaagagtataatagccatcaggttttatgcgatggaacacctgagggaccactattacgtaatcctggaaaccatgacaaagccaaaacccccaggctcccatcttcagcagatgtggaattttgtctgagtttgacccagtatgaatctggatcaatggatagaactgccaatttcagctttagaaacacactggaaggatttgccagtccactcacagggatagcagatccttctcaaagtagcatgcacaatgccttacatatctttatgaatggaacaatgtcccaagtacagggatcggccaacgatcccatttttcttcttcaccatgcttttgtggacagtatttttgaacaatggctgcgaaggcaccgccctcttttggaagtttacccagaagccaatgcacctatcggccgtaacagagactcttacatggttcctttcataccgctctatagaaatggtgatttcttcataacatccaaggatctgggatatgactacagctacctccaagagtcagatccaggcttttacagaaattatattgagccttacttggaacaagccagtcgtatctggccatggcttcttggggcagcactggtgggagctgttattgctgcagctctctctgggcttagcagtaggctatgccttcagaagaagaagaagaagaagcaaccccaggaggaaaggcagccactcctcatggacaaagacgactaccacagcttgctgtatcagagccatctgtga

SEQ ID NO: 75 - protein, 533 aa, Mus musculus
MFLAVLYCLLWSFQISDGHFPRACASSKNLLAKECCPPWIGDGSPCGQLSGRGSCQDILLSSAPSGPQFPFKGVDDRESWPSVFYNRTCQCSGNFMGFNCGNCKFGFGGPNCTEKRVLIRRNIFDLSVSEKNKFFSYLTLAKHTISSVYVIPTGTYGQMNNGSTPMFNDINIYDLFVWMHYYVSRDTLLGGSEIWRQIDFAHEAPGFLPWHRLFLLLWEQEIRELTGDENFTVPYWDWRDAENCDICTDEYLGGRHPENPNLLSPASFFSSWQIICSRSEEYNSHQVLCDGTPEGPLLRNPGNHDKAKTPRLPSSADVEFCLSLTQYESGSMDRTANFSFRNTLEGFASPLTGIADPSQSSMHNALHIFMNGTMSQVQGSANDPIFLLHHAFVDSIFEQWLRRHRPLLEVYPEANAPIGRNRDSYMVPFIPLYRNGDFFITSKDLGYDYSYLQESDPGFYRNYIEPYLEQASRIWPWLLGAALVGAVIAAALSGLSSRLCLQKKKKKKQPQEERQPLLMDKDDYHSLLTQSHL

SEQ ID NO: 76 - DNA, 2130 bp, Homo sapiens
cgcggaatccggaagaacacaatggatctggtgctaaaaagatgccttcttcatttggctgtgataggtgctttgctggctgtgggggctacaaaagtacccagaaaccaggactggcttggtgtctcaaggcaactcagaaccaaagcctggaacaggcagctgtatccagagtggacagaagcccagagacttgactgctggagaggtggtcaagtgtccctcaaggtcagtaatgatgggcctacactgattggtgcaaatgcctccttctctattgccttgaacttccctggaagccaaaaggtattgccagatgggcaggttatctgggtcaacaataccatcatcaatgggagccaggtgtggggaggacagccagtgtatccccaggaaactgacgatgcctgcatcttccctgatggtggaccttgcccatctggctcttggtctcagaagagaagctttgtttatgtctggaagacctggggccaatactggcaagttctagggggcccagtgtctgggctgagcattgggacaggcagggcaatgctgggcacacacaccatggaagtgactgtctaccatcgccggggatcccggagctatgtgcctcttgctcattccagctcagccttcaccattactgaccaggtgcctttctccgtgagcgtgtcccagttgcgggccttggatggagggaacaagcacttcctgagaaatcagcctctgacctttgccctccagctccatgaccccagtggctatctggctgaagctgacctctcctacacctgggactttggagacagtagtggaaccctgatctctcgggcacttgtggtcactcatacttacctggagcctggcccagtcactgcccaggtggtcctgcaggctgccattcctctcacctcctgtggctcctccccagttccaggcaccacagatgggcacaggccaactgcagaggcccctaacaccacagctggccaagtgcctactacagaagttgtgggtactacacctggtcaggcgccaactgcagagccctctggaaccacatctgtgcaggtgccaaccactgaagtcataagcactgcacctgtgcagatgccaactgcagagagcacaggtatgacacctgagaaggtgccagtttcagaggtcatgggtaccacactggcagagatgtcaactccagaggctacaggtatgacacctgcagaggtatcaattgtggtgctttctggaaccacagctgcacaggtaacaactacagagtgggtggagaccacagctagagagctacctatccctgagcctgaaggtccagatgccagctcaatcatgtctacggaaagtattacaggttccctgggccccctgctggatggtacagccaccttaaggctggtgaagagacaagtccccctggattgtgttctgtatcgatatggttccttttccgtcaccctggacattgtccagggtattgaaagtgccgagatcctgcaggctgtgccgtccggtgagggggatgcatttgagctgactgtgtcctgccaaggcgggctgcccaaggaagcctgcatggagatctcatcgccagggtgccagccccctgcccagcggctgtgccagcctgtgctacccagcccagcctgccagctggttctgcaccagatactgaagggtggctcggggacatactgcctcaatgtgtctctggctgataccaacagcctggcagtggtcagcacccagcttatcatgcctggtcaagaagcaggccttgggcaggttccgctgatcgtgggcatcttgctggtgttgatggctgtggtccttgcatctctgatatataggcgcagacttatgaagcaagacttctccgtaccccagttgccacatagcagcagtcactggctgcgtctaccccgcatcttctgctcttgtcccattggtgagaatagccccctcctcagtgggcagcaggtctgagtactctcatatgatgctgtgattttcctggagttgacagaaacacctatatttcccccagtcttccctgggagactactattaactgaaataaatactcagagcctgaaaaaaaaaaaaaaa

SEQ ID NO: 77 - protein, 661 aa, Homo sapiens
MDLVLKRCLLHLAVIGALLAVGATKVPRNQDWLGVSRQLRTKAWNRQLYPEWTEAQRLDCWRGGQVSLKVSNDGPTLIGANASFSIALNFPGSQKVLPDGQVIWVNNTIINGSQVWGGQPVYPQETDDACIFPDGGPCPSGSWSQKRSFVYVWKTWGQYWQVLGGPVSGLSIGTGRAMLGTHTMEVTVYHRRGSRSYVPLAHSSSAFTITDQVPFSVSVSQLRALDGGNKHFLRNQPLTFALQLHDPSGYLAEADLSYTWDFGDSSGTLISRALVVTHTYLEPGPVTAQVVLQAAIPLTSCGSSPVPGTTDGHRPTAEAPNTTAGQVPTTEVVGTTPGQAPTAEPSGTTSVQVPTTEVISTAPVQMPTAESTGMTPEKVPVSEVMGTTLAEMSTPEATGMTPAEVSIVVLSGTTAAQVTTTEWVETTARELPIPEPEGPDASSIMSTESITGSLGPLLDGTATLRLVKRQVPLDCVLYRYGSFSVTLDIVQGIESAEILQAVPSGEGDAFELTVSCQGGLPKEACMEISSPGCQPPAQRLCQPVLPSPACQLVLHQILKGGSGTYCLNVSLADTNSLAVVSTQLIMPGQEAGLGQVPLIVGILLVLMAVVLASLIYRRRLMKQDFSVPQLPHSSSHWLRLPRIFCSCPIGENSPLLSGQQV

SEQ ID NO: 78 - DNA, 6471 bp, Homo sapiens
ccaaaaacctgcccgttttcactgctaggaggccttgggagggcattagggagagacgctagcgtgctccagtcctcttgggggttcatggaatgggaacttgatctgaaaaacagtcctggagagaagagggagggagtggaggccgtatcaggaataataggttgaggaagactgagggtcctccatgccatttcagacggagggcagtggagccctacctggagtctgggaggccataccccactgtggatggatgtgattctacctctcttgcaccttgcaggtctcaaggatgggaggggcttattcggaggtgaaagactcagatgcatagaggcagggagccagacaatgtcaggagtccaggaacagcctctcaggaaggcaggaagggaacaccatgactggtagtgctgcctgtcctgtccctgtgcctgctgccagccatggaggagcccatcaggtccccagatttacaaatttctgacttccattttgggagtcagccagagggagatttctctgaggagggcagcttcagttaaacagagggagtagcccagggctgggcactcaacaagaagagaactctgtcgaaggacagtgacctccgaacacggggggagggcacaggctgcaccctgccactccctgctgtcagccctggaaaaggtgggtgtgagtgtcaagactggggaggtgggagggaagaggtcagcagggcttagggagtgagcagaaaggtttggagcacatcctggaggtgggaaggaagggatggaaaggaggctgacaagcgggcggcgggcggggggccgccttcctcctctgagaggaggccccgccccacgctatccgggctgtcagccctgatcaaccctgacagagttcccggatgtgctttgccggatgtgctttcccggcggccatcttgggagtctgaaggacctgaggcattttgtgacgaggatcgtctcaggtcagcggagggaggagacttatagacctatccagtcttcaaggtgagggccccgagggagaagttgagggacaaccccaccacagagagaagcagccctggcctgccctatccctgcggtggcacttgtaggtggcggaaacgaagatggtagccgagggctgagggacgtgtcctcacggcagaagaagggaggaaatgccggccctctagagaataaataggaaggcattgaggaggaccgggggaacccccacctcagaggacagattcccagagattcccacctgctcctcaaatcagcccccatagagctctccaggtggctgaggctgagcggccaccctctcactgctgggtgagggggtgtgggggagggggaggaggaggccttgttctgggggtcccatggcaagtcagcatggggagctgcctccagttggcagagggaagattcccaggccctgctgggaacaagagtgaggactgaggggtcacatgtgcgtcagaacagacgtgaggccacagggaccgcgtcccgtggtagagtgctgggaggtgctgccacctcactacctcccactgctctcagtgatgtggagttttcctgaggtttttcctcaggccagcagagtggtggggcctggccctgtctgagaaaatgtgacaatgctaattgaattctgagggggtcacgaacctcagaattgtgggactctgggagtctggccagccccagctgccgtcttagctggaggggctccctcccttcctcttgcaggtgctccagaaagcaggagttgaagacctgggtgtgagggacacatacatcctaaaagcaccacagcagaggaggcccaggcagtgccaggagtcaaggtgagtgcacgacctgactgtgtaccaagggccgtacccccagaaacagtgtcagacctggcagcaccggccctgtagccacccactgtcattcctggtgcctcatggctctgcctgccagctgtgccccgaggtgctttctcgcgtccttctacaggttcccagaagacaaaccccctaggaagacaggcgacctgtgaggccctagagcaccaccttaagagaagaagagctgtaagccggcctttgtcagagccatcatgggtgagtttctcagctgaggccactggcactgtccctctctccctcagtcctgtgggatcccatcatacctattcgtgttcacacgtttacctgctgctcctgaacaatattcatcatgcctctctttctaaaccttccacgccccagctttgagcaaggcttccagaaggcaattttcatactggagttggtagatgcagaggatcccccagatgaggaagaggaggaagcttcctccattttctcttcctctttccactttttattcccctcgtcctcctcctgtttttctttctcatcctcatcctcctctctgcttctgcgttctccaggggacaaggatatgcctactgctgggatgccgagtcttctccagagttcctctgagagtcctcagagttatcctgagggggaggactcccagtctcctctccagattccccagagttctcctgagagcgacgacaccctgtatcctctccagagtcctcagagtcgttctgagggggaggactcctcggatcctctccagagacctcctgaggggaaggactcccagtctcctctccagattccccagagttctcctgagggcgacgacacccagtctcctctccagaattctcagagttctcctgaggggaaggactccctgtctcctctagagatttctcagagccctcctgagggtgaggatgtccagtctcctctgcagaatcctgcgagttccttcttctcctctgctttattgagtattttccagagttcccctgagagtattcaaagtccttttgagggttttccccagtctgttctccagattcctgtgagcgccgcctcctcctccactttagtgagtattttccagagttcccctgagagtactcaaagtccttttgagggttttccccagtctccactccagattcctgtgagccgctccttctcctccactttattgagtattttccagagttcccctgagagaagtcagagaacttctgagggttttgcacagtctcctctccagattcctgtgagctcctcctcgtcctccactttactgagtcttttccagagttcccctgagagaactcagagtacttttgagggttttccccagtctccactccagattcctgtgagccgctccttctcctccactttattgagtattttccagagttcccctgagagaactcagagtacttttgagggttttgcccagtctcctctccagattcctgtgagctcctcctcctcctccactttattgagtcttttccagagttcccctgagagaactcagagtacttttgagggttttccccagtctcttctccagattcctatgacctcctccttctcctctactttattgagtattttccagagttctcctgagagtgctcaaagtacttttgagggttttccccagtctcctctccagattcctgggagcccctccttctcctccactttactgagtcttttccagagttcccctgagagaactcacagtacttttgagggttttccccagtctcctctccagattcctatgacctcctccttctcctctactttattgagtattttacagagttctcctgagagtgctcaaagtgcttttgagggttttccccagtctcctctccagattcctgtgagctcctctttctcctacactttattgagtcttttccagagttcccctgagagaactcagagtacttttgagggttttccccagtctcctctccagattcctgtgagctcctcctcctcctcctccactttattgagtcttttccagagttcccctgagtgtactcaaagtacttttgagggttttccccagtctcctctccagattcctcagagtcctcctgaaggggagaatacccattctcctctccagattgttccaagtcttcctgagtgggaggactccctgtctcctcactactttcctcagagccctcctcagggggaggactccctatctcctcactactttcctcagagccctcctcagggggaggactccctgtctcctcactactttcctcagagccctcagggggaggactccctgtctcctcactactttcctcagagccctcctcagggggaggactccatgtctcctctctactttcctcagagtcctcttcagggggaggaattccagtcttctctccagagccctgtgagcatctgctcctcctccactccatccagtcttccccagagtttccctgagagttctcagagtcctcctgaggggcctgtccagtctcctctccatagtcctcagagccctcctgaggggatgcactcccaatctcctctccagagtcctgagagtgctcctgagggggaggattccctgtctcctctccaaattcctcagagtcctcttgagggagaggactccctgtcttctctccattttcctcagagtcctcctgagtgggaggactccctctctcctctccactttcctcagtttcctcctcagggggaggacttccagtcttctctccagagtcctgtgagtatctgctcctcctccacttctttgagtcttccccagagtttccctgagagtcctcagagtcctcctgaggggcctgctcagtctcctctccagagacctgtcagctccttcttctcctacactttagcgagtcttctccaaagttcccatgagagtcctcagagtcctcctgaggggcctgcccagtctcctctccagagtcctgtgagctccttcccctcctccacttcatcgagtctttcccagagttctcctgtgagctccttcccctcctccacttcatcgagtctttccaagagttcccctgagagtcctctccagagtcctgtgatctccttctcctcctccacttcattgagcccattcagtgaagagtccagcagcccagtagatgaatatacaagttcctcagacaccttgctagagagtgattccttgacagacagcgagtccttgatagagagcgagcccttgttcacttatacactggatgaaaaggtggacgagttggcgcggtttcttctcctcaaatatcaagtgaagcagcctatcacaaaggcagagatgctgacgaatgtcatcagcaggtacacgggctactttcctgtgatcttcaggaaagcccgtgagttcatagagatactttttggcatttccctgagagaagtggaccctgatgactcctatgtctttgtaaacacattagacctcacctctgaggggtgtctgagtgatgagcagggcatgtcccagaaccgcctcctgattcttattctgagtatcatcttcataaagggcacctatgcctctgaggaggtcatctgggatgtgctgagtggaataggggtgcgtgctgggagggagcactttgcctttggggagcccagggagctcctcactaaagtttgggtgcaggaacattacctagagtaccgggaggtgcccaactcttctcctcctcgttacgaattcctgtggggtccaagagctcattcagaagtcattaagaggaaagtagtagagtttttggccatgctaaagaataccgtccctattacctttccatcctcttacaaggatgctttgaaagatgtggaagagagagcccaggccataattgacaccacagatgattcgactgccacagaaagtgcaagctccagtgtcatgtcccccagcttctcttctgagtgaagtctagggcagattcttccctctgagtttgaagggggcagtcgagtttctacgtggtggagggcctggttgaggctggagagaacacagtgctatttgcatttctgttccatatgggtagttatggggtttacctgttttacttttgggtatttttcaaatgcttttcctattaataacaggtttaaatagcttcagaatcctagtttatgcacatgagtcgcacatgtattgctgtttttctggtttaagagtaacagtttgatattttgtaaaaacaaaaacacacccaaacacaccacattgggaaaaccttctgcctcattttgtgatgtgtcacaggttaatgtggtgttactgtaggaattttcttgaaactgtgaaggaactctgcagttaaatagtggaataaagtaaaggattgttaatgtttgcatttcctcaggtcctttagtctgttgttcttgaaaactaaagatacatacctggtttgcttggcttacgtaagaaagtagaagaaagtaaactgtaataaataaagtgtcagtgactcattatttgatgacattgtatcagcatttgcccatag

SEQ ID NO: 79 - protein, 1142 aa, Homo sapiens
MGDKDMPTAGMPSLLQSSSESPQSYPEGEDSQSPLQIPQSSPESDDTLYPLQSPQSRSEGEDSSDPLQRPPEGKDSQSPLQIPQSSPEGDDTQSPLQNSQSSPEGKDSLSPLEISQSPPEGEDVQSPLQNPASSFFSSALLSIFQSSPESIQSPFEGFPQSVLQIPVSAASSSTLVSIFQSSPESTQSPFEGFPQSPLQIPVSRSFSSTLLSIFQSSPERSQRTSEGFAQSPLQIPVSSSSSSTLLSLFQSSPERTQSTFEGFPQSPLQIPVSRSFSSTLLSIFQSSPERTQSTFEGFAQSPLQIPVSSSSSSTLLSLFQSSPERTQSTFEGFPQSLLQIPMTSSFSSTLLSIFQSSPESAQSTFEGFPQSPLQIPGSPSFSSTLLSLFQSSPERTHSTFEGFPQSPLQIPMTSSFSSTLLSILQSSPESAQSAFEGFPQSPLQIPVSSSFSYTLLSLFQSSPERTQSTFEGFPQSPLQIPVSSSSSSSTLLSLFQSSPECTQSTFEGFPQSPLQIPQSPPEGENTHSPLQIVPSLPEWEDSLSPHYFPQSPPQGEDSLSPHYFPQSPPQGEDSLSPHYFPQSPQGEDSLSPHYFPQSPPQGEDSMSPLYFPQSPLQGEEFQSSLQSPVSICSSSTPSSLPQSFPESSQSPPEGPVQSPLHSPQSPPEGMHSQSPLQSPESAPEGEDSLSPLQIPQSPLEGEDSLSSLHFPQSPPEWEDSLSPLHFPQFPPQGEDFQSSLQSPVSICSSSTSLSLPQSFPESPQSPPEGPAQSPLQRPVSSFFSYTLASLLQSSHESPQSPPEGPAQSPLQSPVSSFPSSTSSSLSQSSPVSSFPSSTSSSLSKSSPESPLQSPVISFSSSTSLSPFSEESSSPVDEYTSSSDTLLESDSLTDSESLIESEPLFTYTLDEKVDELARFLLLKYQVKQPITKAEMLTNVISRYTGYFPVIFRKAREFIEILFGISLREVDPDDSYVFVNTLDLTSEGCLSDEQGMSQNRLLILILSIIFIKGTYASEEVIWDVLSGIGVRAGREHFAFGEPRELLTKVWVQEHYLEYREVPNSSPPRYEFLWGPRAHSEVIKRKVVEFLAMLKNTVPITFPSSYKDALKDVEERAQLIIDTTDDSTATESASSSVMSPSFSSE

SEQ ID NO: 80 - DNA, 1004 bp, Homo sapiens
cgccaatttagggtctccggtatctcccgctgagctgctctgttcccggcttagaggaccaggagaagggggagctggaggctggagcctgtaacaccgtggctcgtctcactctggatggtggtggcaacagagatggcagcgcagctggagtgttaggagggcggcctgagcggtaggagtggggctggagcagtaagatggcggccagagcggtttttctggcattgtctgcccagctgctccaagccaggctgatgaaggaggagtcccctgtggtgagctggaggttggagcctgaagacggcacagctctgtgcttcatcttctgaggttgtggcagccacggtgatggagacggcagctcaacaggagcaataggaggagatggagtttcactgtgtcagccaggatggtctcgatctcctgacctcgtgatccgcccgccttggccttccaaagtgccgagattacagcgatgtgcattttgtaagcactttggagccactatcaaatgctgtgaagagaaatgtacccagatgtatcattatccttgtgctgcaggagccggctcctttcaggatttcagtcacatcttcctgctttgtccagaacacattgaccaagctcctgaaagatgtaagtttactacgcatagacttttaaacttcaaccaatgtatttactgaaaataacaaatgttgtaaattccctgagtgttattctacttgtattaaaaggtaataatacataatcattaaaatctgagggatcattgccagagattgttggggagggaaatgttatcaacggtttcattgaaattaaatccaaaaagttatttcctcagaaaaatcaaataaagtttgcatgttttttattcttaaaacattttaaaaaccactgtagaatgatgtaaatagggactgtgcagtatttctgacatatactataaaattattaaaaagtcaatcagtattcaacatcttttacactaaaaagcc

SEQ ID NO: 81 - protein, 43 aa, Homo sapiens
MAARAVFLALSAQLLQARLMKEESPVVSWRLEPEDGTALCFIF

SEQ ID NO: 82 - DNA, 646 bp, Homo sapiens
ctgccgtccggactctttttcctctactgagattcatctgtgtgaaatatgagttggcgaggaagatcgacctatcggcctagaccaagacgctacgtagagcctcctgaaatgattgggcctatgcggcccgagcagttcagtgatgaagtggaaccagcaacacctgaagaaggggaaccagcaactcaacgtcaggatcctgcagctgctcaggagggagaggatgagggagcatctgcaggtcaagggccgaagcctgaagctgatagccaggaacagggtcacccacagactgggtgtgagtgtgaagatggtcctgatgggcaggagatggacccgccaaatccagaggaggtgaaaacgcctgaagaagagatgaggtctcactatgttgcccagactgggattctctggcttttaatgaacaattgcttcttaaatctttccccacggaaaccttgagtgactgaaatatcaaatggcgagagaccgtttagttcctatcatctgtggcatgtgaagggcaatcacagtgttaaaagaagacatgctgaaatgttgcaggctgctcctatgttggaaaattcttcattgaagttctcccaataaagctttacagccttctgcaaagaaaaaaaaaaaa

SEQ ID NO: 83 - protein, 138 aa, Homo sapiens
MSWRGRSTYRPRPRRYVEPPEMIGPMRPEQFSDEVEPATPEEGEPATQRQDPAAAQEGEDEGASAGQGPKPEADSQEQGHPQTGCECEDGPDGQEMDPPNPEEVKTPEEEMRSHYVAQTGILWLLMNNCFLNLSPRKP

SEQ ID NO: 84 - DNA, 766 bp, Homo sapiens
ctctctttcgattcttccatactcagagtacgcacggtctgattttctctttggattcttccaaaatcagagtcagactgctcccggtgccatgaacggagacgacgcctttgcaaggagacccacggttggtgctcaaataccagagaagatccaaaaggccttcgatgatattgccaaatacttctctaaggaagagtgggaaaagatgaaagcctcggagaaaatcttctatgtgtatatgaagagaaagtatgaggctatgactaaactaggtttcaaggccaccctcccacctttcatgtgtaataaacgggccgaagacttccaggggaatgatttggataatgaccctaaccgtgggaatcaggttgaacgtcctcagatgactttcggcaggctccagggaatctccccgaagatcatgcccaagaagccagcagaggaaggaaatgattcggaggaagtgccagaagcatctggcccacaaaatgatgggaaagagctgtgccccccgggaaaaccaactacctctgagaagattcacgagagatctggacccaaaaggggggaacatgcctggacccacagactgcgtgagagaaaacagctggtgatttatgaagagatcagcgaccctgaggaagatgacgagtaactcccctcagggatacgacacatgcccatgatgagaagcagaacgtggtgacctttcacgaacatgggcatggctgcggacccctcgtcatcaggtgcatagcaagtg

SEQ ID NO: 85 - protein, 188 aa, Homo sapiens
MNGDDAFARRPTVGAQIPEKIQKAFDDIAKYFSKEEWEKMKASEKIFYVYMKRKYEAMTKLGFKATLPPFMCNKRAEDFQGNDLDNDPNRGNQVERPQMTFGRLQGISPKIMPKKPAEEGNDSEEVPEASGPQNDGKELCPPGKPTTSEKIHERSGPKRGEHAWTHRLRERKQLVIYEEISDPEEDDE

SEQ ID NO: 86 - DNA, 2974 bp, Homo sapiens
ctcagggcagagggaggaaggacagcagaccagacagtcacagcagccttgacaaaacgttcctggaactcaagctcttctccacagaggaggacagagcagacagcagagaccatggagtctccctcggcccctccccacagatggtgcatcccctggcagaggctcctgctcacagcctcacttctaaccttctggaacccgcccaccactgccaagctcactattgaatccacgccgttcaatgtcgcagaggggaaggaggtgcttctacttgtccacaatctgccccagcatctttttggctacagctggtacaaaggtgaaagagtggatggcaaccgtcaaattataggatatgtaataggaactcaacaagctaccccagggcccgcatacagtggtcgagagataatataccccaatgcatccctgctgatccagaacatcatccagaatgacacaggattctacaccctacacgtcataaagtcagatcttgtgaatgaagaagcaactggccagttccgggtatacccggagctgcccaagccctccatctccagcaacaactccaaacccgtggaggacaaggatgctgtggccttcacctgtgaacctgagactcaggacgcaacctacctgtggtgggtaaacaatcagagcctcccggtcagtcccaggctgcagctgtccaatggcaacaggaccctcactctattcaatgtcacaagaaatgacacagcaagctacaaatgtgaaacccagaacccagtgagtgccaggcgcagtgattcagtcatcctgaatgtcctctatggcccggatgcccccaccatttcccctctaaacacatcttacagatcaggggaaaatctgaacctctcctgccacgcagcctctaacccacctgcacagtactcttggtttgtcaatgggactttccagcaatccacccaagagctctttatccccaacatcactgtgaataatagtggatcctatacgtgccaagcccataactcagacactggcctcaataggaccacagtcacgacgatcacagtctatgcagagccacccaaacccttcatcaccagcaacaactccaaccccgtggaggatgaggatgctgtagccttaacctgtgaacctgagattcagaacacaacctacctgtggtgggtaaataatcagagcctcccggtcagtcccaggctgcagctgtccaatgacaacaggaccctcactctactcagtgtcacaaggaatgatgtaggaccctatgagtgtggaatccagaacgaattaagtgttgaccacagcgacccagtcatcctgaatgtcctctatggcccagacgaccccaccatttccccctcatacacctattaccgtccaggggtgaacctcagcctctcctgccatgcagcctctaacccacctgcacagtattcttggctgattgatgggaacatccagcaacacacacaagagctctttatctccaacatcactgagaagaacagcggactctatacctgccaggccaataactcagccagtggccacagcaggactacagtcaagacaatcacagtctctgcggagctgcccaagccctccatctccagcaacaactccaaacccgtggaggacaaggatgctgtggccttcacctgtgaacctgaggctcagaacacaacctacctgtggtgggtaaatggtcagagcctcccagtcagtcccaggctgcagctgtccaatggcaacaggaccctcactctattcaatgtcacaagaaatgacgcaagagcctatgtatgtggaatccagaactcagtgagtgcaaaccgcagtgacccagtcaccctggatgtcctctatgggccggacacccccatcatttcccccccagactcgtcttacctttcgggagcgaacctcaacctctcctgccactcggcctctaacccatccccgcagtattcttggcgtatcaatgggataccgcagcaacacacacaagttctctttatcgccaaaatcacgccaaataataacgggacctatgcctgttttgtctctaacttggctactggccgcaataattccatagtcaagagcatcacagtctctgcatctggaacttctcctggtctctcagctggggccactgtcggcatcatgattggagtgctggttggggttgctctgatatagcagccctggtgtagtttcttcatttcaggaagactgacagttgttttgcttcttccttaaagcatttgcaacagctacagtctaaaattgcttctttaccaaggatatttacagaaaagactctgaccagagatcgagaccatcctagccaacatcgtgaaaccccatctctactaaaaatacaaaaatgagctgggcttggtggcgcgcacctgtagtcccagttactcgggaggctgaggcaggagaatcgcttgaacccgggaggtggagattgcagtgagcccagatcgcaccactgcactccagtctggcaacagagcaagactccatctcaaaaagaaaagaaaagaagactctgacctgtactcttgaatacaagtttctgataccactgcactgtctgagaatttccaaaactttaatgaactaactgacagcttcatgaaactgtccaccaagatcaagcagagaaaataattaatttcatgggactaaatgaactaatgaggattgctgattctttaaatgtcttgtttcccagatttcaggaaactttttttcttttaagctatccactcttacagcaatttgataaaatatacttttgtgaacaaaaattgagacatttacattttctccctatgtggtcgctccagacttgggaaactattcatgaatatttatattgtatggtaatatagttattgcacaagttcaataaaaatctgctctttgtataacagaaaaa

SEQ ID NO: 87 - protein, 702 aa, Homo sapiens
MESPSAPPHRWCIPWQRLLLTASLLTFWNPPTTAKLTIESTPFNVAEGKEVLLLVHNLPQHLFGYSWYKGERVDGNRQIIGYVIGTQQATPGPAYSGREIIYPNASLLIQNIIQNDTGFYTLHVIKSDLVNEEATGQFRVYPELPKPSISSNNSKPVEDKDAVAFTCEPETQDATYLWWVNNQSLPVSPRLQLSNGNRTLTLFNVTRNDTASYKCETQNPVSARRSDSVILNVLYGPDAPTISPLNTSYRSGENLNLSCHAASNPPAQYSWFVNGTFQQSTQELFIPNITVNNSGSYTCQAHNSDTGLNRTTVTTITVYAEPPKPFITSNNSNPVEDEDAVALTCEPEIQNTTYLWWVNNQSLPVSPRLQLSNDNRTLTLLSVTRNDVGPYECGIQNELSVDHSDPVILNVLYGPDDPTISPSYTYYRPGVNLSLSCHAASNPPAQYSWLIDGNIQQHTQELFISNITEKNSGLYTCQANNSASGHSRTTVKTITVSAELPKPSISSNNSKPVEDKDAVAFTCEPEAQNTTYLWWVNGQSLPVSPRLQLSNGNRTLTLFNVTRNDARAYVCGIQNSVSANRSDPVTLDVLYGPDTPIISPPDSSYLSGANLNLSCHSASNPSPQYSWRINGIPQQHTQVLFIAKITPNNNGTYACFVSNLATGRNNSIVKSITVSASGTSPGLSAGATVGIMIGVLVGVALI

SEQ ID NO: 88 - DNA, 5296 bp, Homo sapiens
ttttttttagtattaagcagaggccgggggcccctggcctccgcttactctggagaaaaagaagagaggcttccagaggcaacttgtcaaaacaggactggcgccttggaggcgctgtggggccacccaaattgatataattaagccccaaccgcctcttcccgcctcatttcagcctcaccaccatcatggatagagttctgagcagagctgacaaagaaaggctgctagaacttctaaaacttcccagacaactatggggggattttggaagaatgcagcaggcatataagcagcagtcactgctactgcacccagacaaaggtggaagccatgccttaatgcaggaattgaacagtctctggggaacatttaaaactgaagtatacaatctgagaatgaatctaggaggaaccggcttccaggtaagaaggctacatgcggatgggtggaatctaagtaccaaagacacctttggtgatagatactaccagcggttctgcagaatgcctcttacctgcctagtaaatgttaaatacagctcatgtagttgtatattatgcctgcttagaaagcaacatagagagctcaaagacaaatgtgatgccaggtgcctagtacttggagaatgtttttgtcttgaatgttacatgcaatggtttggaacaccaacccgagatgtgctgaacctgtatgcagacttcattgcaagcatgcctatagactggctggacctggatgtgcacagcgtgtataatccaagtaagtatcaagagggcgggtgggtatttacggcctatattcttacagggctctccccctagaacggcggagcgaggaactgaggagagcggccacagtccactacacgatgactactggtcattcagctatggaagcaagtacttcacaagggaatggaatgatttcttcagaaagtgggaccccagctaccagtcgccgcctaagactgccgagtcttctgagcaacccgacctattctgttatgaggagccactcctatcccccaacccgagttctccaacagatacacccgcacatactgctggaagaagacgaaatccttgtgttgctgagcccgatgacagcatatccccggacccccccagaactcctgtatccagaaagcgaccaagaccagctggagccactggaggaggaggaggaggagtacatgccaatggaggatctgtatttggacatcctaccggaggaacaagtaccccagctcatccccccccctatcattcccagggcgggtctgagtccatgggagggtctgattcttcgggatttgcagagggctcatttcgatccgatcctagatgcgagtcagagaatgagagctactcacagagctgctctcagagctcattcaatgcaacgccacctaagaaggctagggaggaccctgctcctagtgactttcctagcagccttactgggtatttgtctcatgctatttattctaataaaacgttcccggcatttctagtatactccaccaaagagaaatgcaaacaattatatgataccatagggaagttcaggcccgaattcaaatgcctggtccattatgaggaggggggcatgctgttctttctaactatgactaagcacagggtttcagcagttaagaattattgctctaagctttgcagcgtcagcttcctaatgtgtaaggcagtcaccaagcctatggaatgctatcaagttgtaaccgcagcaccatttcagttaataacagaaaataagccaggcctccaccaattcgagtttacagacgagccagaagaacagaaagcagtagactggattatggtagcagactttgcactagaaaacaaccttgatgatcccctgttaattatggggtattatcttgattttgccaaagaggttccttcatgcataaagtgtagcaaagaggaaacccgcctccaaatacattggaaaaaccatagaaagcatgcagagaatgcagacctcttcctgaattgtaaagctcaaaagacaatctgtcagcaggcagctgacggagtcttggcatccaggagactgaaattagtagagtgtacccgcagccagctattaaaggagagattgcaacagtctctcctcaggctaaaagaacttggctcctccgatgctctactctacctagcaggtgtcgcttggtaccagtgtcttttagaggactttcctcaaaccctgtttaagatgcttaagctgctaacagaaaatgtgccaaaacgacgcaacatactttttagaggaccagttaattcaggaaagacaggcctagcagccgcgcttattagcctgttaggaggcaagtctctcaacataaattgccctgcagataaacttgcttttgagcttggtgtggcacaggaccagtttgtggtctgttttgaagatgtaaagggtcaaatagccttgaacaaacaactgcagccagggatgggagtggctaatctagataatctcagggactacctggatgggagtgtaaaggtcaatctagaaaaaaagcacagcaacaaaaggtcacaactctttccaccctgtgtgtgtacaatgaatgaatatctcctaccacaaacagtatgggcccggtttcacatggtgttggatttcacctgcaaaccccatctggcccaatctcttgaaaagtgtgaatttttgcaaagggaaagaattattcagagtggagatacccttgccctattactcatatggaatttcacttcagatgtatttgatcctgatattcagggtcttgtgaaggaggttcgtgaccagtttgctagtgagtgctcctacagtttgttttgtgatatactttgtaatgtgcaagaaggcgacgaccccttgaaggacatatgtgaatatagctgaatacacagtttattgaataaacattaatttccaggaaatacagtctttgtttttccaaagcggtcaacatagcgcgtcatatcagggtcccccggtacaggttcagtcccatcatacactctaacctcctctacctgggtgttctccccttccatgggttggccctgcacttgggggagcatgttgttgaaaagggaacttatgagggaggccatgggatagggatttttgacccatctttttctcagggtgattttgaaatatctgggaagccctctccagtgatggacatcatagtttcttgtaactctcctgcccattatatctacacaggagaggtataggccctctcctttacagaggggcccaactccattttcatctaggagcacagttgtcagggtgtttgtgaactgcaggacgggtggagttgttgtgcctccagtgtaattgccaaagtaccttgtgttctcattttttgctggatctggatgccagatttcaactggatacattccgtccttatccagcttggccttgctaattggattcaggacttggtctttgttgaccatgtccttctttgtgattgttttgattgttactaccccttcttccttgtattttgttctggcatctgtcacaagtccctggaggtcaagcggttccccgcccacagcaaacacatgatattggctgccttccactggagtggaaattacttttgtgtttactgtatctgtgggtttgttgaacccatgcacatctaacagtgagccagagcccaccacctcggttttcactgagactgcctcccacatttgtagggtgtcacaggtgaggtcctcattgagcatgggaagctggagctttgccatactccatgtgggaagtgtattattttctggggaatcctctgtatctgatgtagccaaattaatccctctgctccaaccatagtattgccctccctctgttaggctttcaggggtgggtggctgccccattctggggttcagaaaagcttctatttctgtcacactgtctggccctgtcacaaggtccagcacctccataccccctttaataagcagtttgggaacgggtgcgggtcttggacaggcctttgtacattttgtctcgcatttagagacgccgctttttcttttgggggccatcttcctctatgactgttgcccaagtaggtgtgatatcaccgtacagccctagaattaaaggaagcatccagtcaggagtgactctttggtgggcaccacctggggcctgatagaactttatcacctcacctgactcatcctgtatatgtgctgcaggggtaggcccaccatttcccatgctcccttctatgcgattaaagagtgctctcctctgtggtggattaagacctagttgcctataatagtcacttagtgatgagtaccctgagctcactgatgaggcacctctgttgattgcatctatggctgactgaggagcattagaaaccacccaccgggtgttttcaagtagcctagctaggccatccaggaatgtatgtgtctgtcttacagttagttctcttacagctccttccagtctgtgttgtgtttcctgcacaaccatttgccacacatatcttcccacggaatgaagtaggccatggccccaatcatgtactacatttagagcatgagcaaactgattaactcctgggaagtatatatcgagaagggctggatcccgccatggtatcaacgccatatttctatttacagtagggacctcttcgttgtgtaggtaccgctgtattcctagggaaatagtagaggcaccttgaactgtctgcatcagccatatagcccccgctgttcgatttacaaacacaggcacagtactgacaaacccatacacctcctctgaaatacccatagttgctagggctgtctccgaactcattacaccctccaaagtcagagctgtaatttcgccatcaagggcagcgagggcttctccagataaaatagcttctgccgagagtcccgtaagggtagacacttcagctaatccctcgatgaggtctactagaatagtcagtgcggctcccattttgaaaattcacttacttgatcagcttcagaagatggcggagggcctccaacacagtaattttcctcccgactcttaaaatagaaaatgtcaagtcagttaagcaggaagtgactaactgaccgcagctggccgtgcgacatcctcttttagttagttgctaggcaactgccctccagagggcagtgtggttttgcaagaggaagcaaaaagcctctccacccaggcctagaatgtttccacccaatcattactatgacaacagctg

SEQ ID NO: 89 - protein, 783 aa, Homo sapiens
MDRVLSRADKERLLELLKLPRQLWGDFGRMQQAYKQQSLLLHPDKGGSHALMQELNSLWGTFKTEVYNLRMNLGGTGFQGSPPRTAERGTEESGHSPLHDDYWSFSYGSKYFTREWNDFFRKWDPSYQSPPKTAESSEQPDLFCYEEPLLSPNPSSPTDTPAHTAGRRRNPCVAEPDDSISPDPPRTPVSRKRPRPAGATGGGGGGVHANGGSVFGHPTGGTSTPAHPPPYHSQGGSESMGGSDSSGFAEGSFRSDPRCESENESYSQSCSQSSFNATPPKKAREDPAPSDFPSSLTGYLSHAIYSNKTFPAFLVYSTKEKCKQLYDTIGKFRPEFKCLVHYEEGGMLFFLTMTKHRVSAVKNYCSKLCSVSFLMCKAVTKPMECYQVVTAAPFQLITENKPGLHQFEFTDEPEEQKAVDWIMVADFALENNLDDPLLIMGYYLDFAKEVPSCIKCSKEETRLQIHWKNHRKHAENADLFLNCKAQKTICQQAADGVLASRRLKLVECTRSQLLKERLQQSLLRLKELGSSDALLYLAGVAWYQCLLEDFPQTLFKMLKLLTENVPKRRNILFRGPVNSGKTGLAAALISLLGGKSLNINCPADKLAFELGVAQDQFVVCFEDVKGQIALNKQLQPGMGVANLDNLRDYLDGSVKVNLEKKHSNKRSQLFPPCVCTMNEYLLPQTVWARFHMVLDFTCKPHLAQSLEKCEFLQRERIIQSGDTLALLLIWNFTSDVFDPDIQGLVKEVRDQFASECSYSLFCDILCNVLQEGDDPLKDICEYS

SEQ ID NO: 90 - DNA, 1504 bp, Homo sapiens
cctaagatgagctttccatgtaaatttgtagccagcttccttctgattttcaatgtttcttccaaaggtgcagtctccaaagagattacgaatgccttggaaacctggggtgccttgggtcaggacatcaacttggacattcctagttttcaaatgagtgatgatattgacgatataaaatgggaaaaaacttcagacaagaaaaagattgcacaattcagaaaagagaaagagactttcaaggaaaaagatacatataagctatttaaaaatggaactctgaaaattaagcatctgaagaccgatgatcaggatatctacaaggtatcaatatatgatacaaaaggaaaaaatgtgttggaaaaaatatttgatttgaagattcaagagagggtctcaaaaccaaagatctcctggacttgtatcaacacaaccctgacctgtgaggtaatgaatggaactgaccccgaattaaacctgtatcaagatgggaaacatctaaaactttctcagagggtcatcacacacaagtggaccaccagcctgagtgcaaaattcaagtgcacagcagggaacaaagtcagcaaggaatccagtgtcgagcctgtcagctgtccagagaaaggtctggacatctatctcatcattggcatatgtggaggaggcagcctcttgatggtctttgtggcactgctcgttttctatatcaccaaaaggaaaaaacagaggagtcggagaaatgatgaggagctggagacaagagcccacagagtagctactgaagaaaggggccggaagccccaacaaattccagcttcaacccctcagaatccagcaacttcccaacatcctcctccaccacctggtcatcgttcccaggcacctagtcatcgtcccccgcctcctggacaccgtgttcagcaccagcctcagaagaggcctcctgctccgtcgggcacacaagttcaccagcagaaaggcccgcccctccccagacctcgagttcagccaaaacctccccatggggcagcagaaaactcattgtccccttcctctaattaaaaaagatagaaactgtctttttcaataaaaagcactgtggatttctgccctcctgatgtgcatatccgtacttccatgaggtgttttctgtgtgcagaacattgtcacctcctgaggctgtgggccacagccacctctgcatcttcgaactcagccatgtggtcaacatctggagtttttggtctcctcagagagctccatcacaccagtaaggagaagcaatataagtgtgattgcaagaatggtagaggaccgagcacagaaatcttagagatttcttgtcccctctcaggtcatgtgtagatgcgataaatcaagtgattggtgtgcctgggtctcactacaagcagcctatctgcttaagagactctggagtttcttatgtgccctggtggacacttgcccaccatcctgtgagtaaaagtgaaataaaagctttgac

SEQ ID NO: 91 - protein, 351 aa, Homo sapiens
MSFPCKFVASFLLIFNVSSKGAVSKEITNALETWGALGQDINLDIPSFQMSDDIDDIKWEKTSDKKKIAQFRKEKETFKEKDTYKLFKNGTLKIKHLKTDDQDIYKVSIYDTKGKNVLEKIFDLKIQERVSKPKISWTCINTTLTCEVMNGTDPELNLYQDGKHLKLSQRVITHKWTTSLSAKFKCTAGNKVSKESSVEPVSCPEKGLDIYLIIGICGGGSLLMVFVALLVFYITKRKKQRSRRNDEELETRAHRVATEERGRKPQQIPASTPQNPATSQHPPPPPGHRSQAPSHRPPPPGHRVQHQPQKRPPAPSGTQVHQQKGPPLPRPRVQPKPPHGAAENSLSPSSN

SEQ ID NO: 92 - DNA, 2026 bp, Homo sapiens
tggagttcacacacacatctacatggagatcacacacactctacatggagctcacacatacgcctcaacatggagatcacacaacatcagagatgacacacacaacacagagatcacacaagtcaacatggagatctctctctctctacacacacacacacacacacacacacacacacacacacacactggcacaagcccagcattcatggcgcagccatctcttgtacttgctagcaaaacaccacctgtggaaagtcagctcaaacttccaacctcatccctcacaaagggggaatggagggtttggttttggctttcactggagtctgcaacaagaactggcatcatgctgcccatttcccgcctctccccacccagacccctgcctcagggacgcctgtcctcagcccagccctcagctgcagccaggccttcagcctccgtaacccccgctcagggtccccaccccctgcagccctgtccctccagatgcatggccttgtcctgtgtgggggtggccgagagcactgccccagccctgggtaccttgggcaggaagctggcagaggccagggctgccattcaaacaggggcaggtggttttgccaggaggaagttgacagttcaacttcaaacatgggtgacgcaggccccacactgcctgctccccgtcccacccctccctgagcacgccaccccgccctctccctctctgagagcgagatacccggccagacaccctcacctgcggtgcccagctgcccaggctgaggcaagagaaggccagaaaccatgcccatggggtctctgcaaccgctggccaccttgtacctgctggggatgctgggtgagtacccctcccaggtgtcctgcgaacacccgggctcgctccagtgcaaggaaggagttcccagttttacccaaggctgactctgggatccacatgtcagccctctggagcgttgtggagatttggggccactgggatccctgcctgcccccactaagccgcagcttggccctctgtcctgcatgtcccacccgccaggagcacaaccttgcctctctcatgcgctgttgagaaccctgctttacccttccagtgcaagagagactgcaggggggacccgcatttgatggggcccagacaacttgattcctaggctgagttggattttagcagagcattcaggcctccctctgcgaggtcccccactgacagcccagtctttacttggtcgcctccagagacatggaaactcgccgtctccgaggcagctctgatgatgctctggacagacagcgggccgaggcagggtgggagccgcctctgaggacgatgtctgagcaaatgtcaaggactcatagcggaagtcctagggcctctcatgcccagtcctgggtcaagtcccagaggggcccagccaggccggctgggatgagtacacgctgggcctgctctcactccagccctgggttgtaagcccaaccctgtgtgacctcggataggtccccaagcctctccaggccttgatctccccatttatgaaatgtgggggttgggggtgtgaactggatgaggcctgacccacttcctgaggatttagaaggtctggcagggtgacagaggtgcgtgactctgggctggaaacaggaggatgcgagcagcttccaggctggcagggagagggtcccgaggcctcgcctgcctgagcagggagcctcagcagccttctagggaaaccggtgtgcaggtgtgagtgtgggggaatgcatgtgtgtgtgtctgtgtgcatgtgtgtgagaactgtgtgtgggggaatgtgtgagtctatgtgtgtctgtgtgagtctgtgtgtacgtgtgtgagaactgtgttggggggtaatgtgtgactctgtgtgtgagtctgtgtgtgagtctctggccatgtgtgtgagtactgtgtgtaggggaatgtgtgagtctgtgtgtgagtctgtgtgtgagtctctgggcatgtgtgtgagtactgtctgggggg

SEQ ID NO: 93 - protein, 495 aa, Homo sapiens
MPMGSLQPLATLYLLGMLVASCLGRLSWYDPDFQARLTRSNSKCQGQLEVYLKDGWHMVCSQSWGRSSKQWEDPSQASKVCQRLNCGVPLSLGPFLVTYTPQSSIICYGQLGSFSNCSHSRNDMCHSLGLTCLEPQKTTPPTTRPPPTTTPEPTAPPRLQLVAQSGGQHCAGVVEFYSGSLGGTISYEAQDKTQDLENFLCNNLQCGSFLKHLPETEAGRAQDPGEPREHQPLPIQWKIQNSSCTSLEHCFAKIKPQKSGRVLALLCSGFQPKVQSRLVGGSSICEGTVEVRQGAQWAALCDSSSARSSLRWEEVCREQQCGSVNSYRVLDAGDPTSRGLFCPHQKLSQCHELWERNSYCKKVFVTCQDPNPAGLAAGTVASIILALVLLVVLLVVCGPLAYKKLVKKFRQKKQRQWIGPTGMNQNMSFHRNHTATVRSHAENPTASHVDNEYSQPPRNSRLSAYPALEGVLHRSSMQPDNSSDSDYDLHGAQRL

SEQ ID NO: 94 - DNA, 1586 bp, Homo sapiens
gaggacaggtttgtgcgctggacgcaagcaccaggcgcagcctcgctcgccgacacccggccagaacgtgttacgagtcagtttttagtgaaaaaacattgagctaggagccaagacccatctcttcactattttggtattgtgcaagtcatcttacctctctggatctcagttgtctcatctgtaaaaaggagataaaaattatttacctgcctgaacatgaggtggaggaccatcctgctacagtattgctttctcttgattacatgtttacttactgctcttgaagctgtgcctattgacatagacaagacaaaagtacaaaatattcaccctgtggaaagtgcgaagatagaaccaccagatactggactttattatgatgaatatctcaagcaagtgattgatgtgctggaaacagataaacacttcagagaaaagctccagaaagcagacatagaggaaataaagagtgggaggctaagcaaagaactggatttagtaagtcaccatgtgaggacaaaacttgatgaactgaaaaggcaagaagtaggaaggttaagaatgttaattaaagctaagttggattcccttcaagatataggcatggaccaccaagctcttctaaaacaatttgatcacctaaaccacctgaatcctgacaagtttgaatccacagatttagatatgctaatcaaagcggcaacaagtgatctggaacactatgacaagactcgtcatgaagaatttaaaaaatatgaaatgatgaaggaacatgaaaggagagaatatttaaaaacattgaatgaagaaaagagaaaagaagaagagtctaaatttgaagaaatgaagaaaaagcatgaaaatcaccctaaagttaatcacccaggaagcaaagatcaactaaaagaggtatgggaagagactgatggattggatcctaatgactttgaccccaagacatttttcaaattacatgatgtcaatagtgatggattcctggatgaacaagaattagaagccctatttactaaagagttggagaaagtatatgaccctaaaaatgaagaggatgatatggtagaaatggaagaagaaaggcttagaatgagggaacatgtaatgaatgaggttgatactaacaaagacagattggtgactctggaggagtttttgaaagccacagaaaaaaaagaattcttggagccagatagctgggagacattagatcagcaacagttcttcacagaggaagaactaaaagaatatgaaaatattattgctttacaagaaaatgaacttaagaagaaggcagatgagcttcagaaacaaaaagaagagctacaacgtcagcatgatcaactggaggctcagaagctggaatatcatcaggtcatacagcagatggaacaaaaaaaattacaacaaggaattcctccatcagggccagctggagaattgaagtttgagccacacatttaaagtctgaagtccaccagaacttggaagaaagctgttaactcaacatctatttcatctttttagctcccttcccttttctctgctcaataaatattttaaaagca

SEQ ID NO: 95 - protein, 420 aa, Homo sapiens
MRWRTILLQYCFLLITCLLTALEAVPIDIDKTKVQNIHPVESAKIEPPDTGLYYDEYLKQVIDVLETDKHFREKLQKADIEEIKSGRLSKELDLVSHHVRTKLDELKRQEVGRLRMLIKAKLDSLQDIGMDHQALLKQFDHLNHLNPDKFESTDLDMLIKAATSDLEHYDKTRHEEFKKYEMMKEHERREYLKTLNEEKRKEEESKFEEMKKKHENHPKVNHPGSKDQLKEVWEETDGLDPNDFDPKTFFKLHDVNSDGFLDEQELEALFTKELEKVYDPKNEEDDMVEMEEERLRMREHVMNEVDTNKDRLVTLEEFLKATEKKEFLEPDSWETLDQQQFFTEEELKEYENIIALQENELKKKADELQKQKEELQRQHDQLEAQKLEYHQVIQQMEQKKLQQGIPPSGPAGELKFEPHI

SEQ ID NO: 96 - DNA, 1204 bp, Homo sapiens
ggggtgcaaagaagagacagcagcgcccagcttggaggtgctaactccagaggccagcatcagcaactgggcacagaaaggagccgcctgggcagggaccatggcacggccacatccctggtggctgtgcgttctggggaccctggtggggctctcagctactccagcccccaagagctgcccagagaggcactactgggctcagggaaagctgtgctgccagatgtgtgagccaggaacattcctcgtgaaggactgtgaccagcatagaaaggctgctcagtgtgatccttgcataccgggggtctccttctctcctgaccaccacacccggccccactgtgagagctgtcggcactgtaactctggtcttctcgttcgcaactgcaccatcactgccaatgctgagtgtgcctgtcgcaatggctggcagtgcagggacaaggagtgcaccgagtgtgatcctcttccaaacccttcgctgaccgctcggtcgtctcaggccctgagcccacaccctcagcccacccacttaccttatgtcagtgagatgctggaggccaggacagctgggcacatgcagactctggctgacttcaggcagctgcctgcccggactctctctacccactggccaccccaaagatccctgtgcagctccgattttattcgcatccttgtgatcttctctggaatgttccttgttttcaccctggccggggccctgttcctccatcaacgaaggaaatatagatcaaacaaaggagaaagtcctgtggagcctgcagagccttgtcgttacagctgccccagggaggaggagggcagcaccatccccatccaggaggattaccgaaaaccggagcctgcctgctccccctgagccagcacctgcggtagctgcactacagccctggcctccacccccaccccgccgaccatccaagggagagtgagacctggcagccacaactgcagtcccatcctcttgtcagggccctttcctgtgtacacgtgacagagtgccttttcgagactggcagggacgaggacaaatatggatgaggtggagagtgggaagcaggagcccagccagctgcgcctgcgctgcaggagggcgggggctctggttgtaaaacacacttcctgctgcgaaagacccacatgctacaagacgggcaaaataaagtgacagatgaccacc

SEQ ID NO: 97 - protein, 260 aa, Homo sapiens
MARPHPWWLCVLGTLVGLSATPAPKSCPERHYWAQGKLCCQMCEPGTFLVKDCDQHRKAAQCDPCIPGVSFSPDHHTRPHCESCRHCNSGLLVRNCTITANAECACRNGWQCRDKECTECDPLPNPSLTARSSQALSPHPQPTHLPYVSEMLEARTAGHMQTLADFRQLPARTLSTHWPPQRSLCSSDFIRILVIFSGMFLVFTLAGALFLHQRRKYRSNKGESPVEPAEPCRYSCPREEEGSTIPIQEDYRKPEPACSP

SEQ ID NO: 98 - DNA, 1514 bp, Homo sapiens
agactctcaggccttggcaggtgcgtctttcagttcccctcacacttcgggttcctcggggaggaggggctggaaccctagcccatcgtcaggacaaagatgctcaggctgctcttggctctcaacttattcccttcaattcaagtaacaggaaacaagattttggtgaagcagtcgcccatgcttgtagcgtacgacaatgcggtcaaccttagctgcaagtattcctacaatctcttctcaagggagttccgggcatcccttcacaaaggactggatagtgctgtggaagtctgtgttgtatatgggaattactcccagcagcttcaggtttactcaaaaacggggttcaactgtgatgggaaattgggcaatgaatcagtgacattctacctccagaatttgtatgttaaccaaacagatatttacttctgcaaaattgaagttatgtatcctcctccttacctagacaatgagaagagcaatggaaccattatccatgtgaaagggaaacacctttgtccaagtcccctatttcccggaccttctaagcccttttgggtgctggtggtggttggtggagtcctggcttgctatagcttgctagtaacagtggcctttattattttctgggtgaggagtaagaggagcaggctcctgcacagtgactacatgaacatgactccccgccgccccgggcccacccgcaagcattaccagccctatgccccaccacgcgacttcgcagcctatcgctcctgacacggacgcctatccagaagccagccggctggcagcccccatctgctcaatatcactgctctggataggaaatgaccgccatctccagccggccacctcagcccctgttgggccaccaatgccaatttttctcgagtgactagaccaaatatcaagatcattttgagactctgaaatgaagtaaaagagatttcctgtgacaggccaagtcttacagtgccatggcccacattccaacttaccatgtacttagtgacttgactgagaagttagggtagaaaacaaaaagggagtggattctgggagcctcttccctttctcactcacctgcacatctcagtcaagcaaagtgtggtatccacagacattttagttgcagaagaaaggctaggaaatcattccttttggttaaatgggtgtttaatcttttggttagtgggttaaacggggtaagttagagtagggggagggataggaagacatatttaaaaaccattaaaacactgtctcccactcatgaaatgagccacgtagttcctatttaatgctgttttcctttagtttagaaatacatagacattgtcttttatgaattctgatcatatttagtcattttgaccaaatgagggatttggtcaaatgagggattccctcaaagcaatatcaggtaaaccaagttgctttcctcactccctgtcatgagacttcagtgttaatgttcacaatatactttcgaaagaataaaatagttc

SEQ ID NO: 99 - protein, 220 aa, Homo sapiens
MLRLLLALNLFPSIQVTGNKILVKQSPMLVAYDNAVNLSCKYSYNLFSREFRASLHKGLDSAVEVCVVYGNYSQQLQVYSKTGFNCDGKLGNESVTFYLQNLYVNQTDIYFCKIEVMYPPPYLDNEKSNGTIIHVKGKHLCPSPLFPGPSKPFWVLVVVGGVLACYSLLVTVAFIIFWVRSKRSRLLHSDYMNMTPRRPGPTRKHYQPYAPPRDFAAYRS

SEQ ID NO: 100 - DNA, 672 bp, Homo sapiens
atggcttgccttggatttcagcggcacaaggctcagctgaacctggctgccaggacctggccctgcactctcctgttttttcttctcttcatccctgtcttctgcaaagcaatgcacgtggcccagcctgctgtggtactggccagcagccgaggcatcgccagctttgtgtgtgagtatgcatctccaggcaaagccactgaggtccgggtgacagtgcttcggcaggctgacagccaggtgactgaagtctgtgcggcaacctacatgacggggaatgagttgaccttcctagatgattccatctgcacgggcacctccagtggaaatcaagtgaacctcactatccaaggactgagggccatggacacgggactctacatctgcaaggtggagctcatgtacccaccgccatactacctgggcataggcaacggaacccagatttatgtaattgatccagaaccgtgcccagattctgacttcctcctctggatccttgcagcagttagttcggggttgtttttttatagctttctcctcacagctgtttctttgagcaaaatgctaaagaaaagaagccctcttacaacaggggtctatgtgaaaatgcccccaacagagccagaatgtgaaaagcaatttcagccttattttattcccatcaattga

SEQ ID NO: 101 - protein, 223 aa, Homo sapiens
MACLGFQRHKAQLNLAARTWPCTLLFFLLFIPVFCKAMHVAQPAVVLASSRGIASFVCEYASPGKATEVRVTVLRQADSQVTEVCAATYMTGNELTFLDDSICTGTSSGNQVNLTIQGLRAMDTGLYICKVELMYPPPYYLGIGNGTQIYVIDPEPCPDSDFLLWILAAVSSGLFFYSFLLTAVSLSKMLKKRSPLTTGVYVKMPPTEPECEKQFQPYFIPIN

SEQ ID NO: 102 - DNA, 2339 bp, Homo sapiens
acgaaggccacgcgcccggcgcccctgagccggccgagcggcgacggaccgcgagatgaggaaaatgaggcccaaagaagtgatgccacttggttaaggtcccagagcaggtcagaatcagacctaggatcagaaacctggctcctggctcctgctccctactcttctaaggatcgctgtcctgacagaagagaactcctctttcctaaaatggagtcgagtaaaaagatggactctcctggcgcgctgcagactaacccgccgctaaagctgcacactgaccgcagtgctgggacgccagtttttgtccctgaacaaggaggttacaaggaaaagtttgtgaagaccgtggaggacaagtacaagtgtgagaagtgccacctggtgctgtgcagcccgaagcagaccgagtgtgggcaccgcttctgcgagagctgcatggcggccctgctgagctcttcaagtccaaaatgtacagcgtgtcaagagagcatcgttaaagataaggtgtttaaggataattgctgcaagagagaaattctggctcttcagatctattgtcggaatgaaagcagaggttgtgcagagcagttaatgctgggacatctggtgcatttaaaaaatgattgccattttgaagaacttccatgtgtgcgtcctgactgcaaagaaaaggtcttgaggaaagacctgcgagaccacgtggagaaggcgtgtaaataccgggaagccacatgcagccactgcaagagtcaggttccgatgatcgcgctgcagaaacacgaagacaccgactgtccctgcgtggtggtgtcctgccctcacaagtgcagcgtccagactctcctgaggagcgagttgagtgcacacttgtcagagtgtgtcaatgcccccagcacctgtagttttaagcgctatggctgcgtttttcaggggacaaaccagcagatcaaggcccacgaggccagctccgccgtgcagcacgtcaacctgctgaaggagtggagcaactcgctcgaaaagaaggtttccttgttgcagaatgaaagtgtagaaaaaaacaagagcatacaaagtttgcacaatcagatatgtagctttgaaattgaaattgagagacaaaaggaaatgcttcgaaataatgaatccaaaatccttcatttacagcgagtgatagacagccaagcagagaaactgaaggagcttgacaaggagatccggcccttccggcagaactgggaggaagcagacagcatgaagagcagcgtggagtccctccagaaccgcgtgaccgagctggagagcgtggacaagagcgcggggcaagtggctcggaacacaggcctgctggagtcccagctgagccggcatgaccagatgctgagtgtgcacgacatccgcctagccgacatggacctgggcttccaggtcctggagaccgccagctacaatggagtgctcatctggaagattcgcgactacaagcggcggaagcaggaggccgtcatggggaagaccctgtccctttacagccagcctttctacactggttactttggctataagatgtgtgccagggtctacctgaacggggacgggatggggaaggggacgcacttgtcgctgttttttgtcatcatgcgtggagaatatgatgccctgcttccttggccgtttaagcagaaagtgacactcatgctgatggatcaggggtcctctcgacgtcatttgggagatgcattcaagcccgaccccaacagcagcagcttcaagaagcccactggagagatgaatatcgcctctggctgcccagtctttgtggcccaaactgttctagaaaatgggacatatattaaagatgatacaatttttattaaagtcatagtggatacttcggatctgcccgatccctgataagtagctggggaggtggatttagcagaaggcaactcctctgggggatttgaaccggtctgtcttcactgaggtcctcgcgctcagaaaaggaccttgtgagacggaggaagcggcagaaggcggacgcgtgccggcgggaggagccacgcgagagcacacctgacacgttttataatagactagccacacttcactctgaagaattatttatccttcaacaagataaatattgctgtcagagaaggttttcattttcatttttaaagatctagttaattaaggtggaaaacatatatgctaaacaaaagaaacatgatttttcttccttaaacttgaacaccaaaaaaacacacacacacacacacgtggggatagctggacatgtcagcatgttaagtaaaaggagaatttatgaaatagta

SEQ ID NO: 103 - protein, 567 aa, Homo sapiens [sequence omitted]

SEQ ID NO: 104 - DNA, 1874 bp, Homo sapiens
gaattccggcaggcacaaactcatccatccccagttgattggaagaaacaacgatgactcctgggaagacctcattggtgtcactgctactgctgctgagcctggaggccatagtgaaggcaggaatcacaatcccacgaaatccaggatgcccaaattctgaggacaagaacttcccccggactgtgatggtcaacctgaacatccataaccggaataccaataccaatcccaaaaggtcctcagattactacaaccgatccacctcaccttggaatctccaccgcaatgaggaccctgagagatatccctctgtgatctgggaggcaaagtgccgccacttgggctgcatcaacgctgatgggaacgtggactaccacatgaactctgtccccatccagcaagagatcctggtcctgcgcagggagcctccacactgccccaactccttccggctggagaagatactggtgtccgtgggctgcacctgtgtcaccccgattgtccaccatgtggcctaagagctctggggagcccacactccccaaagcagttagactatggagagccgacccagcccctcaggaaccctcatccttcaaagacagcctcatttcggactaaactcattagagttcttaaggcagtttgtccaattaaagcttcagaggtaacacttggccaagatatgagatctgaattacctttccctctttccaagaaggaaggtttgactgagtaccaatttgcttcttgtttacttttttaagggctttaagttatttatgtatttaatatgccctgagataactttggggtataagattccattttaatgaattacctactttattttgtttgtctttttaaagaagataagattctgggcttgggaattttattatttaaaaggtaaaacctgtatttatttgagctatttaaggatctatttatgtttaagtatttagaaaaaggtgaaaaagcactattatcagttctgcctaggtaaatgtaagatagaattaaatggcagtgcaaaatttctgagtctttacaacatacggatatagtatttcctcctctttgtttttaaaagttataacatggctgaaaagaaagattaaacctactttcatatgtattaatttaaattttgcaatttgttgaggttttacaagagatacagcaagtctaactctctgttccattaaacccttataataaaatccttctgtaataataaagtttcaaaagaaaatgtttatttgttctcattaaatgtattttagcaaactcagctcttccctattgggaagagttatgcaaattctcctataagcaaaacaaagcatgtctttgagtaacaatgacctggaaatacccaaaattccaagttctcgatttcacatgccttcaagactgaacaccgactaaggttttcatactattagccaatgctgtagacagaagcattttgataggaatagagcaaataagataatggccctgaggaatggcatgtcattattaaagatcatatggggaaaatgaaaccctccccaaaatacaagaagttctgggaggagacattgtcttcagactacaatgtccagtttctcccctagactcaggcttcctttggagattaaggcccctcagagatcaacagaccaacatttttctcttcctcaagcaacactcctagggcctggcttctgtctgatcaaggcaccacacaacccagaaaggagctgatggggcagaatgaactttaagtatgagaaaagttcagcccaagtaaaataaaaactcaatcacattcaattccagagtagtttcaagtttcacatcgtaaccattttcgcccggaattc

SEQ ID NO: 105 - protein, 155 aa, Homo sapiens
MTPGKTSLVSLLLLLSLEAIVKAGITIPRNPGCPNSEDKNFPRTVMVNLNIHNRNTNTNPKRSSDYYNRSTSPWNLHRNEDPERYPSVIWEAKCRHLGCINADGNVDYHMNSVPIQQEILVLRREPPHCPNSFRLEKILVSVGCTCVTPIVHHVA

SEQ ID NO: 106 - DNA, 3120 bp, Homo sapiens
ggggccgagccctccgcgacgccacccgggccatgggggccgcacgcagcccgccgtccgctgtcccggggcccctgctggggctgctcctgctgctcctgggcgtgctggccccgggtggcgcctccctgcgactcctggaccaccgggcgctggtctgctcccagccggggctaaactgcacggtcaagaatagtacctgcctggatgacagctggattcaccctcgaaacctgaccccctcctccccaaaggacctgcagatccagctgcactttgcccacacccaacaaggagacctgttccccgtggctcacatcgaatggacactgcagacagacgccagcatcctgtacctcgagggtgcagagttatctgtcctgcagctgaacaccaatgaacgtttgtgcgtcaggtttgagtttctgtccaaactgaggcatcaccacaggcggtggcgttttaccttcagccactttgtggttgaccctgaccaggaatatgaggtgaccgttcaccacctgcccaagcccatccctgatggggacccaaaccaccagtccaagaatttccttgtgcctgactgtgagcacgccaggatgaaggtaaccacgccatgcatgagctcaggcagcctgtgggaccccaacatcaccgtggagaccctggaggcccaccagctgcgtgtgagcttcaccctgtggaacgaatctacccattaccagatcctgctgaccagttttccgcacatggagaaccacagttgctttgagcacatgcaccacatacctgcgcccagaccagaagagttccaccagcgatccaacgtcacactcactctacgcaaccttaaagggtgctgtcgccaccaagtgcagatccagcccttcttcagcagctgcctcaatgactgcctcagacactccgcgactgtttcctgcccagaaatgccagacactccagaaccaattccggactacatgcccctgtgggtgtactggttcatcacgggcatctccatcctgctggtgggctccgtcatcctgctcatcgtctgcatgacctggaggctagctgggcctggaagtgaaaaatacagtgatgacaccaaatacaccgatggcctgcctgcggctgacctgatccccccaccgctgaagcccaggaaggtctggatcatctactcagccgaccaccccctctacgtggacgtggtcctgaaattcgcccagttcctgctcaccgcctgcggcacggaagtggccctggacctgctggaagagcaggccatctcggaggcaggagtcatgacctgggtgggccgtcagaagcaggagatggtggagagcaactctaagatcatcgtcctgtgctcccgcggcacgcgcgccaagtggcaggcgctcctgggccggggggcgcctgtgcggctgcgctgcgaccacggaaagcccgtgggggacctgttcactgcagccatgaacatgatcctcccggacttcaagaggccagcctgcttcggcacctacgtagtctgctacttcagcgaggtcagctgtgacggcgacgtccccgacctgttcggcgcggcgccgcggtacccgctcatggacaggttcgaggaggtgtacttccgcatccaggacctggagatgttccagccgggccgcatgcaccgcgtaggggagctgtcgggggacaactacctgcggagcccgggcggcaggcagctccgcgccgccctggacaggttccgggactggcaggtccgctgtcccgactggttcgaatgtgagaacctctactcagcagatgaccaggatgccccgtccctggacgaagaggtgtttgaggagccactgctgcctccgggaaccggcatcgtgaagcgggcgcccctggtgcgcgagcctggctcccaggcctgcctggccatagacccgctggtcggggaggaaggaggagcagcagtggcaaagctggaacctcacctgcagccccggggtcagccagcgccgcagcccctccacaccctggtgctcgccgcagaggagggggccctggtggccgcggtggagcctgggcccctggctgacggtgccgcagtccggctggcactggcgggggagggcgaggcctgcccgctgctgggcagcccgggcgctgggcgaaatagcgtcctcttcctccccgtggaccccgaggactcgccccttggcagcagcacccccatggcgtctcctgacctccttccagaggacgtgagggagcacctcgaaggcttgatgctctcgctcttcgagcagagtctgagctgccaggcccaggggggctgcagtagacccgccatggtcctcacagacccacacacgccctacgaggaggagcagcggcagtcagtgcagtctgaccagggctacatctccaggagctccccgcagccccccgagggactcacggaaatggaggaagaggaggaagaggagcaggacccagggaagccggccctgccactctctcccgaggacctggagagcctgaggagcctccagcggcagctgcttttccgccagctgcagaagaactcgggctgggacacgatggggtcagagtcagaggggcccagtgcatgagggcggctccccagggaccgcccagatcccagctttgagagaggagtgtgtgtgcacgtattcatctgtgtgtacatgtctgcatgtgtatatgttcgtgtgtgaaatgtaggctttaaaatgtaaatgtctggattttaatcccaggcatccctcctaacttttctttgtgcagcggtctggttatcgtctatccccaggggaatccacacagcccgctcccaggagctaatggtagagcgtccttgaggctccattattcgttcattcagcatttattgtgcacctactatgtggcgggcatttgggataccaagataaattgcatgcggcatggccccagccatgaaggaacttaaccgctagtgccgaggacacgttaaacgaacaggatgggccgggcacggtggctcacgcctgtaatcccagcacactgggaggccgaggcaggtggatcactctgaggtcaggagtttgagccagcctg

SEQ ID NO: 107 - protein, 866 aa, Homo sapiens
MGAARSPPSAVPGPLLGLLLLLLGVLAPGGASLRLLDHRALVCSQPGLNCTVKNSTCLDDSWIHPRNLTPSSPKDLQIQLHFAHTQQGDLFPVAHIEWTLQTDASILYLEGAELSVLQLNTNERLCVRFEFLSKLRHHHRRWRFTFSHFVVDPDQEYEVTVHHLPKPIPDGDPNHQSKNFLVPDCEHARMKVTTPCMSSGSLWDPNITVETLEAHQLRVSFTLWNESTHYQILLTSFPHMENHSCFEHMHHIPAPRPEEFHQRSNVTLTLRNLKGCCRHQVQIQPFFSSCLNDCLRHSATVSCPEMPDTPEPIPDYMPLWVYWFITGISILLVGSVILLIVCMTWRLAGPGSEKYSDDTKYTDGLPAADLIPPPLKPRKVWIIYSADHPLYVDVVLKFAQFLLTACGTEVALDLLEEQAISEAGVMTWVGRQKQEMVESNSKIIVLCSRGTRAKWQALLGRGAPVRLRCDHGKPVGDLFTAAMNMILPDFKRPACFGTYVVCYFSEVSCDGDVPDLFGAAPRYPLMDRFEEVYFRIQDLEMFQPGRMHRVGELSGDNYLRSPGGRQLRAALDRFRDWEVRCPDWFECENLYSADDQDAPSLDEEVFEEPLLPPGTGIVKRAPLVREPGSQACLAIDPLVGEEGGAAVAKLEPHLQPRGQPAPQPLHTLVLAAEEGALVAAVEPGPLADGAAVRLALAGEGEACPLLGSPGAGRNSVLFLPVDPEDSPLGSSTPMASPDLLPEDVREHLEGLMLSLFEQSLSCQAQGGCSRPAMVLTDPHTPYEEEQRQSVQSDQGYISRSSPQPPEGLTEMEEEEEEEQDPGKPALPLSPEDLESLRSLQRQLLFRQLQKNSGWDTMGSESEGPSA

SEQ ID NO: 108 - DNA, 578 bp, Homo sapiens
ctttagcaccagttggtgtaggagttgagacctacttcacagtagttctgtggacaatcacaatgggaatccaaggagggtctgtcctgttcgggctgctgctcgtcctggctgtcttctgccattcaggtcatagcctgcagtgctacaactgtcctaacccaactgctgactgcaaaacagccgtcaattgttcatctgattttgatgcgtgtctcattaccaaagctgggttacaagtgtataacaagtgttggaagtttgagcattgcaatttcaacgacgtcacaacccgcttgagggaaaatgagctaacgtactactgctgcaagaaggacctgtgtaactttaacgaacagcttgaaaatggtgggacatccttatcagagaaaacagttcttctgctggtgactccatttctggcagcagcctggagccttcatccctaagtcaacaccaggagagcttctcccaaactccccgttcctgcgtagtccgctttctcttgctgccacattctaaaggcttgatattttccaaatggatcctgttgggaaagaataaaattagcttgagca

SEQ ID NO: 109 - protein, 128 aa, Homo sapiens
MGIQGGSVLFGLLLVLAVFCHSGHSLQCYNCPNPTADCKTAVNCSSDFDACLITKAGLQVYNKCWKFEHCNFNDVTTRLRENELTYYCCKKDLCNFNEQLENGGTSLSEKTVLLLVTPFLAAAWSLHP

SEQ ID NO: 110 - DNA, 1048 bp, Homo sapiens
ctgtgaaagaaggaagcatgtggtccagaggttgggattcgtgtctggctctggaattgctactgctgcctctgtcactcctggtgaccagcattcaaggtcacttggtacatatgaccgtggtctccggcagcaacgtgactctgaacatctctgagagcctgcctgagaactacaaacaactaacctggttttatactttcgaccagaagattgtagaatgggattccagaaaatctaagtactttgaatccaaatttaaaggcagggtcagacttgatcctcagagtggcgcactgtacatctctaaggtccagaaagaggacaacagcacctacatcatgagggtgttgaaaaagactgggaatgagcaagaatggaagatcaagctgcaagtgcttgaccctgtacccaagcctgtcatcaaaattgagaagatagaagacatggatgacaactgttatctgaaactgtcatgtgtgatacctggcgagtctgtaaactacacctggtatggggacaaaaggcccttcccaaaggagctccagaacagtgtgcttgaaaccacccttatgccacataattactccaggtgttatacttgccaagtcagcaattctgtgagcagcaagaatggcaccgtctgcctcagtccaccctgtaccctggcccggtcctttggagtagaatggattgcaagttggctagtggtcacggtgcccaccattcttggcctgttacttacctgagatgagctcttttaactcaagcgaaacttcaaggccagaagatcttgcctgttggtgatcatgctcctcagcaggacagagactgtataggctgaccagaagcatgctgctgaattatcaacgaggattttcaagttaacttttaaatactggttattatttaattttatatccctttgttgttttgtagtacacagagattatagagatacacatgcttttttcccaaaattgtgacaacattatgtggaatcttttattatttttaaaataaaaagatataattataaaaaaaaaaa

SEQ ID NO: 111 - protein, 243 aa, Homo sapiens [sequence omitted]

SEQ ID NO: 112 - DNA, 1040 bp, Homo sapiens
cgacgagccatggttgctgggagcgacgcggggcgggccctgggggtcctcagcgtggtctgcctgctgcactgctttggtttcatcagctgtttttcccaacaaatatatggtgttgtgtatgggaatgtaactttccatgtaccaagcaatgtgcctttaaaagaggtcctatggaaaaaacaaaaggataaagttgcagaactggaaaattctgaattcagagctttctcatcttttaaaaatagggtttatttagacactgtgtcaggtagcctcactatctacaacttaacatcatcagatgaagatgagtatgaaatggaatcgccaaatattactgataccatgaagttctttctttatgtgcttgagtctcttccatctcccacactaacttgtgcattgactaatggaagcattgaagtccaatgcatgataccagagcattacaacagccatcgaggacttataatgtactcatgggattgtcctatggagcaatgtaaacgtaactcaaccagtatatattttaagatggaaaatgatcttccacaaaaaatacagtgtactcttagcaatccattatttaatacaacatcatcaatcattttgacaacctgtatcccaagcagcggtcattcaagacacagatatgcacttatacccataccattagcagtaattacaacatgtattgtgctgtatatgaatggtattctgaaatgtgacagaaaaccagacagaaccaactccaattgattggtaacagaagatgaagacaacagcataactaaattattttaaaaactaaaaagccatctgatttctcatttgagtattacaatttttgaacaactgttggaaatgtaacttgaagcagctgctttaagaagaaatacccactaacaaagaacaagcattagttttggctgtcatcaacttattatatgactaggtgcttgctttttttgtcagtaaattgtttttactgatgatgtagatacttttgtaaataaatgtaaatatgtacacaagtg

SEQ ID NO: 113 - protein, 250 aa, Homo sapiens
MVAGSDAGRALGVLSVVCLLHCFGFISCFSQQIYGVVYGNVTFHVPSNVPLKEVLWKKQKDKVAELENSEFRAFSSFKNRVYLDTVSGSLTIYNLTSSDEDEYEMESPNITDTMKFFLYVLESLPSPTLTCALTNGSIEVQCMIPEHYNSHRGLIMYSWDCPMEQCKRNSTSIYFKMENDLPQKIQCTLSNPLFNTTSSIILTTCIPSSGHSRHRYALIPIPLAVITTCIVLYMNGILKCDRKPDRTNSN

SEQ ID NO: 114 - DNA, 1358 bp, Homo sapiens
tggaagactgtgaagcagaggcgcccagggctatggctgacgctatcacgtatgcagacctgcgctttgtgaaagtgcccctgaagaacagcgcatctaaccatctaggacaggactgtgaggcctatgaagatggggaactcacctacgagaacgtgcaagtgtctccagtcccaggagggccaccaggcttggcttcccctgcactagcggacaaagcaggggtcgggtcagagcaaccaactgcgacctggagctctgtgaagtcgtctgctctcaggcagattccccgctgtcctacggtctgcttgcaaaacttcttgcttggccttctcctgtcctgtctgatgttaggggtggctgtcatctgcctgggagttcgctatctgcaggtgtctcagcagttccaggaggggaccaggatttgggaagccaccaatagcagcctgcagcagcagctcagggagaagataagtcagctggggcagaaggaggtggagcttcaggagtctcagaaagagctgatctcgagccaggacacattacaggagaagcagaggactcacaaggacactgagcagcaactacaagcctgccaggctgagagagcgaagaccaaggagaacctgaaaactgaggaggagcggaggagggacctggaccagaggttgacaagcacgcgggagacactgaggcgcttgtcctcctgttcatcagacacctgctgtccatgcggatggattccatatcaggaaaggtgcttttacatctcacataccctcagaagtctggaggagagccaaaaatactgcacatctctgtcctccaaactggcagcattcgatgaaccttctaagtattactatgaatacctctctgacgccccccaggtttctctgcccagcggcttagaggagttgctagatcgttcgaagtcatattggatacagatgagcaagaagtggaggcatgactatgactctcaaagccgatattgtgacaagataaaaaaatattaccagaagtggaaaagaacattttctgagtgtgcagagcttcacccctgcatttgtgagtcggaggctttcaggtttcctgatgggatccatctgaactgaaccggatacttgaacaagaccttgtgacctacatccttaacctaaggcctgccaatttttaagactgctattcctccagcactccctcactctcgggcatgcccagctaagggatgacctgctgcttgcttgaaagctgctccagaaactggactactcttgggaagagtaaagaagcctccagaaaagacttgaccttccttaaatacttcccaaactagagatgggtcaggggagggc

SEQ ID NO: 115 - protein, 359 aa, Homo sapiens
MADAITYADLRFVKVPLKNSASNHLGQDCEAYEDGELTYENVQVSPVPGGPGLASPALADKAGVGSEQPTATWSSVKSSALRQIPRCPTVCLQNFLLGLLLSCLMLGVAVICLGVRYLQVSQQFQEGTRIWEATNSSLQQQLREKISQLGQKEVEQESQKELISSQDTLQEKQRTHKDTEQQLQACQAERAKTKENLKTEEERRRDLDQRLTSTRETLRRLSSCSSDTCCPCGWIPYQERCFYISHTLRSLEESQKYCTSLSSKLAAFDEPSKYYYEYLSDAPQVSLPSGLEELLDRSKSYWIQMSKKWRHDYDSQSRYCDKIKKYYQKWKRTFSECAELHPCICESEAFRFPDGIHLN

SEQ ID NO: 116 - DNA, 856 bp, Mus musculus
gaagttgcctaaagctccaggggatttccctgccctccgagaagaggcccagttcttcccctgcatcggacatccccgaggttctaagggcaggtcaaggcaggcagaagcttcaaaagctcggctgaggaggctacagcttcccgctgccttcaggccgctgcttccgtgcagggatgccggaggaaggtcgcccttgcccctgggttcgctggagcgggaccgcgttccagcgccaatggccatggctgctgctggtggtgtttattactgtgttttgctgttggtttcattgtagcggactactcagtaagcagcaacagaggctgctggagcaccctgagccgcacacagctgagttacagctgaatctcacagttcctcggaaggaccccacactgcgctggggagcaggcccagccttgggaaggtccttcacacacggaccagagctggaggagggccatctgcgtatccatcaagatggcctctacaggctgcatatccaggtgacactggccaactgctcttccccaggcagcaccctgcagcacagggccaccctggctgtgggcatctgctcccccgctgcgcacggcatcagcttgctgcgtgggcgctttggacaggactgtacagtggcattacagcgcctgacatacctggtccacggagatgtcctctgtaccaacctcaccctgcctctgctgccgtcccgcaacgctgatgagaccttctttggagttcagtggatatgcccttgaccacaactccaggatgacttgtgaatattttttttcttttcaagttctacgtatttataaatgtatatagtacacataaaaaaaaaaaaaaa

SEQ ID NO: 117 - protein, 195 aa, Mus musculus
MPEEGRPCPWVRWSGTAFQRQWPWLLLVVFITVFCCWFHCSGLLSKQQQRLLEHPEPHTAELQLNLTVPRKDPTLRWGAGPALGRSFTHGPELEEGHLRIHQDGLYRLHIQVTLANCSSPGSTLQHRATLAVGICSPAAHGISLLRGRFGQDCTVALQRLTYLVHGDVLCTNLTLPLLPSRNADETFFGVQWICP

SEQ ID NO: 118 - DNA, 909 bp, Homo sapiens
atgcggctgggcagtcctggactgctcttcctgctcttcagcagccttcgagctgatactcaggagaaggaagtcagagcgatggtaggcagcgacgtggagctcagctgcgcttgccctgaaggaagccgttttgatttaaatgatgtttacgtatattggcaaaccagtgagtcgaaaaccgtggtgacctaccacatcccacagaacagctccttggaaaacgtggacagccgctaccggaaccgagccctgatgtcaccggccggcatgctgcggggcgacttctccctgcgcttgttcaacgtcaccccccaggacgagcagaagtttcactgcctggtgttgagccaatccctgggattccaggaggttttgagcgttgaggttacactgcatgtggcagcaaacttcagcgtgcccgtcgtcagcgccccccacagcccctcccaggatgagctcaccttcacgtgtacatccataaacggctaccccaggcccaacgtgtactggatcaataagacggacaacagcctgctggaccaggctctgcagaatgacaccgtcttcttgaacatgcggggcttgtatgacgtggtcagcgtgctgaggatcgcacggacccccagcgtgaacattggctgctgcatagagaacgtgcttctgcagcagaacctgactgtcggcagccagacaggaaatgacatcggagagagagacaagatcacagagaatccagtcagtaccggcgagaaaaacgcggccacgtggagcatcctggctgtcctgtgcctgcttgtggtcgtggcggtggccataggctgggtgtgcagggaccgatgcctccaacacagctatgcaggtgcctgggctgtgagtccggagacagagctcactggccacgtttga

SEQ ID NO: 119 - protein, 302 aa, Homo sapiens
MRLGSPGLLFLLFSSLRADTQEKEVRAMVGSDVELSCACPEGSRFDLNDVYVYWQTSESKTVVTYHIPQNSSLENVDSRYRNRALMSPAGMLRGDFSLRLFNVTPQDEQKFHCLVLSQSLGFQEVLSVEVTLHVAANFSVPVVSAPHSPSQDELTFTCTSINGYPRPNVYWINKTDNSLLDQALQNDTVFLNMRGLYDVVSVLRIARTPSVNIGCCIENVLLQQNLTVGSQTGNDIGERDKITENPVSTGEKNAATWSILAVLCLLVVVAVAIGWVCRDRCLQHSYAGAWAVSPETELTGHV

SEQ ID NO: 120 - DNA, 1424 bp, Homo sapiens
aggagccttaggaggtacggggagctcgcaaatactccttttggtttattcttaccaccttgcttctgtgttccttgggaatgctgctgtgcttatgcatctggtctctttttggagctacagtggacaggcatttgtgacagcactatgggactgagtaacattctctttgtgatggccttcctgctctctggtgctgctcctctgaagattcaagcttatttcaatgagactgcagacctgccatgccaatttgcaaactctcaaaaccaaagcctgagtgagctagtagtattttggcaggaccaggaaaacttggttctgaatgaggtatacttaggcaaagagaaatttgacagtgttcattccaagtatatgggccgcacaagttttgattcggacagttggaccctgagacttcacaatcttcagatcaaggacaagggcttgtatcaatgtatcatccatcacaaaaagcccacaggaatgattcgcatccaccagatgaattctgaactgtcagtgcttgctaacttcagtcaacctgaaatagtaccaatttctaatataacagaaaatgtgtacataaatttgacctgctcatctatacacggttacccagaacctaagaagatgagtgttttgctaagaaccaagaattcaactatcgagtatgatggtattatgcagaaatctcaagataatgtcacagaactgtacgacgtttccatcagcttgtctgtttcattccctgatgttacgagcaatatgaccatcttctgtattctggaaactgacaagacgcggcttttatcttcacctttctctatagagcttgaggaccctcagcctcccccagaccacattccttggattacagctgtacttccaacagttattatatgtgtgatggttttctgtctaattctatggaaatggaagaagaagaagcggcctcgcaactcttataaatgtggaaccaacacaatggagagggaagagagtgaacagaccaagaaaagagaaaaaatccatatacctgaaagatctgatgaagcccagcgtgtttttaaaagttcgaagacatcttcatgcgacaaaagtgatacatgtttttaattaaagagtaaagcccatacaagtattcattttttctaccctttcctttgtaagttcctgggcaacctttttgatttcttccagaaggcaaaaagacattaccatgagtaataagggggctccaggactccctctaagtggaatagcctccctgtaactccagctctgctccgtatgccaagaggagactttaattctcttactgcttcttttcacttcagagcacacttatgggccaagcccagcttaatggctcatgacctggaaataaaatttaggaccaataaaaaaaaaaaaaaaaaaaa

SEQ ID NO: 121 - protein, 323 aa, Homo sapiens
MGLSNILFVMAFLLSGAAPLKIQAYFNETADLPCQFANSQNQSLSELVVFWQDQENLVLNEVYLGKEKFDSVHSKYMGRTSFDSDSWTLRLHNLQIKDKGLYQCIIHHKKPTGMIRIHQMNSELSVLANFSQPEIVPISNITENVYINLTCSSIHGYPEPKKMSVLLRTKNSTIEYDGIMQKSQDNVTELYDVSISLSVSFPDVTSNMTIFCILETDKTRLLSSPFSIELEDPQPPPDHIPWITAVLPTVIICVMVFCLILWKWKKKKRPRNSYKCGTNTMEREESEQTKKREKIHIPERSDEAQRVFKSSKTSSCDKSDTCF

SEQ ID NO: 122 - DNA, 1816 bp, Homo sapiens
cttctctgccagaagataccatttcaactttaacacagcatgatcgaaacatacaaccaaacttctccccgatctgcggccactggactgcccatcagcatgaaaatttttatgtatttacttactgtttttcttatcacccagatgattgggtcagcactttttgctgtgtatcttcatagaaggttggacaagatagaagatgaaaggaatcttcatgaagattttgtattcatgaaaacgatacagagatgcaacacaggagaaagatccttatccttactgaactgtgaggagattaaaagccagtttgaaggctttgtgaaggatataatgttaaacaaagaggagacgaagaaagaaaacagctttgaaatgcaaaaaggtgatcagaatcctcaaattgcggcacatgtcataagtgaggccagcagtaaaacaacatctgtgttacagtgggctgaaaaaggatactacaccatgagcaacaacttggtaaccctggaaaatgggaaacagctgaccgttaaaagacaaggactctattatatctatgcccaagtcaccttctgttccaatcgggaagcttcgagtcaagctccatttatagccagcctctgcctaaagtcccccggtagattcgagagaatcttactcagagctgcaaatacccacagttccgccaaaccttgcgggcaacaatccattcacttgggaggagtatttgaattgcaaccaggtgcttcggtgtttgtcaatgtgactgatccaagccaagtgagccatggcactggcttcacgtcctttggcttactcaaactctgaacagtgtcaccttgcaggctgtggtggagctgacgctgggagtcttcataatacagcacagcggttaagcccaccccctgttaactgcctatttataaccctaggatcctccttatggagaactatttattatacactccaaggcatgtagaactgtaataagtgaattacaggtcacatgaaaccaaaacgggccctgctccataagagcttatatatctgaagcagcaaccccactgatgcagacatccagagagtcctatgaaaagacaaggccattatgcacaggttgaattctgagtaaacagcagataacttgccaagttcagttttgtttctttgcgtgcagtgtctttccatggataatgcatttgatttatcagtgaagatgcagaagggaaatggggagcctcagctcacattcagttatggttgactctgggttcctatggccttgttggagggggccaggctctagaacgtctaacacagtggagaaccgaaacccccccccccccccccgccaccctctcggacagttattcattctctttcaatctctctctctccatctctctctttcagtctctctctctcaacctctttcttccaatctctctttctcaatctctctgtttccctttgtcagtctcttccctcccccagtctctcttctcaatccccctttctaacacacacacacacacacacacacacacacacacacacacacacacacacacacacacacacacagagtcaggccgttgctagtcagttctcttctttccaccctgtccctatctctaccactatagatgagggtgaggagtagggagtgcagccctgagcctgcccactcctcattacgaaatgactgtatttaaaggaaatctattgtatctacctgcagtctccattgtttccagagtgaacttgtaattatcttgttatttattttttgaataataaagacctcttaacattaaaa

SEQ ID NO: 123 - protein, 261 aa, Homo sapiens
MIETYNQTSPRSAATGLPISMKIFMYLLTVFLITQMIGSALFAVYLHRRLDKIEDERNLHEDFVFMKTIQRCNTGERSLSLLNCEEIKSQFEGFVKDIMLNKEETKKENSFEMQKGDQNPQIAAHVISEASSKTTSVLQWAEKGYYTMSNNLVTLENGKQLTVKRQGLYYIYAQVTFCSNREASSQAPFIASLCLKSPGRFERILLRAANTHSSAKPCGQQSIHLGGVFELQPGASVFVNVTDPSQVSHGTGFTSFGLLKL

SEQ ID NO: 124 - DNA, 1879 bp, Homo sapiens
gcctcgggaggtggtggagtgacctggccccagtgctgcgtccttatcagccgagccggtcccagctcttgctcctgcctgtttgcctggaaatggccacgcttctccttctccttggggtgctggtggtaagcccagacgctctggggagcacaacagcagtgcagacacccacctccggagagcctttggtctctactagcgagcccctgagctcaaagatgtacaccacttcaataacaagtgaccctaaggccgacagcactggggaccagacctcagccctacctccctcaacttccatcaatgagggatcccctctttggacttccattggtgccagcactggttcccctttacctgagccaacaacctaccaggaagtttccatcaagatgtcatcagtgccccaggaaacccctcatgcaaccagtcatcctgctgttcccataacagcaaactctctaggatcccacaccgtgacaggtggaaccataacaacgaactctccagaaacctccagtaggaccagtggagcccctgttaccacggcagctagctctctggagacctccagaggcacctctggaccccctcttaccatggcaactgtctctctggagacttccaaaggcacctctggaccccctgttaccatggcaactgactctctggagacctccactgggaccactggaccccctgttaccatgacaactggctctctggagccctccagcggggccagtggaccccaggtctctagcgtaaaactatctacaatgatgtctccaacgacctccaccaacgcaagcactgtgcccttccggaacccagatgagaactcacgaggcatgctgccagtggctgtgcttgtggccctgctggcggtcatagtcctcgtggctctgctcctgctgtggcgccggcggcagaagcggcggactggggccctcgtgctgagcagaggtggcaagcgtaacggggtggtggacgcctgggctgggccagcccaggtccctgaggagggggccgtgacagtgaccgtgggagggtccgggggcgacaagggctctgggttccccgatggggaggggtctagccgtcggcccacgctcaccactttctttggcagacggaagtctcgccagggctccctggcgatggaggagctgaagtctgggtcaggccccagcctcaaaggggaggaggagccactggtggccagtgaggatggggctgtggacgccccagctcctgatgagcccgaagggggagacggggctgccccttaagtgtcggtgaatagtgaggctggaggccggaatctcagccagcctccagcaccttccctctcaccatcccactgccccctcgctcccatgtttccacccggcaccctgatcctcacccgaatctcctttttttttttcttttgagacagagtttcgctttgtcgcccaggctggagtgcaatgcacgatctcagttcactgcaacctctgcctcctaagttcaggcgattctcctgcctcagcttcccgagtaactgagattacaggcacccaccaccatgcccagctgcttttttgtatttttggtagagatggggtttcaccatgttggctaggctggtctcaaactcctgacctcaggtgatctacctgcctcagcctcccaaagtgctgagattacagacatgagcctccgcgccttgcctcctcacccacctcttcactctgaatcctcatgaggcttctcagccctggatttcctgctgccatcctcacccagcacccacaactagcgcctgggcagggcagggctggcacctctcaacgtctgtggactgaatgaataaaccctcctcatccacccc

SEQ ID NO: 125 - protein, 400 aa, Homo sapiens
MATLLLLLGVLVVSPDALGSTTAVQTPTSGEPLVSTSEPLSSKMYTTSITSDPKADSTGDQTSALPPSTSINEGSPLWTSIGASTGSPLPEPTTYQEVSIKMSSVPQETPHATSHPAVPITANSLGSHTVTGGTITTNSPETSSRTSGAPVTTAASSLETSRGTSGPPLTMATVSLETSKGTSGPPVTMATDSLETSTGTTGPPVTMTTGSLEPSSGASGPQVSSVKLSTMMSPTTSTNASTVPFRNPDENSRGMLPVAVLVALLAVIVLVALLLLWRRRQKRRTGALVLSRGGKRNGVVDAWAGPAQVPEEGAVTVTVGGSGGDKGSGFPDGEGSSRRPTLTTFFGRRKSRQGSLAMEELKSGSGPSLKGEEEPLVASEDGAVDAPAPDEPEGGDGAAP

SEQ ID NO: 126 - DNA, 3567 bp, Homo sapiens
cgccatcccgcgctctgcggactgggaggcccgggccaggacgcgagtctgcgcagccgaggttccccagcgccccctgcagccgcgcgtaggcagagacggagcccggccctgcgcctccgcaccacgcccgggaccccacccagcggcccgtacccggagaagcagcgcgagcacccgaagctcccggctcggcggcagaaaccgggagtggggccgggcgagtgcgcggcatcccaggccggcccgaacgtccgcccgcggtgggccgacttcccctcctcttccctctctccttcctttagcccgctggcgccggacacgctgcgcctcatctcttggggcgttcttccccgttggccaaccgtcgcatcccgtgcaactttggggtagtggccgcttagtgttgaatgttccccaccgagagcgcatggcttgggaagcgaggcgcgaacccgggccccgaagccgccgtccgggagacggtgatgctgttgctgtgcctgggggtcccgaccggccgcccctacaacgtggacactgagagcgcgctgctttaccagggcccccacaacacgctgttcggctactcggtcgtgctgcacagccacggggcgaaccgatggctcctagtgggtgcgcccactgccaactggctcgccaacgcttcagtgatcaatcccggggcgatttacagatgcaggatcggaaagaatcccggccagacgtgcgaacagctccagctgggtagccctaatggagaaccttgtggaaagacttgtttggaagagagagacaatcagtggttgggggtcacactttccagacagccaggagaaaatggatccatcgtgacttgtgggcatagatggaaaaatatattttacataaagaatgaaaataagctccccactggtggttgctatggagtgccccctgatttacgaacagaactgagtaaaagaatagctccgtgttatcaagattatgtgaaaaaatttggagaaaattttgcatcatgtcaagctggaatatccagtttttacacaaaggatttaattgtgatgggggccccaggatcatcttactggactggctctctttttgtctacaatataactacaaataaatacaaggcttttttagacaaacaaaatcaagtaaaatttggaagttatttaggatattcagtcggagctggtcattttcggagccagcatactaccgaagtagtcggaggagctcctcaacatgagcagattggtaaggcatatatattcagcattgatgaaaaagaactaaatatcttacatgaaatgaaaggtaaaaagcttggatcgtactttggagcttctgtctgtgctgtggacctcaatgcagatggcttctcagatctgctcgtgggagcacccatgcagagcaccatcagagaggaaggaagagtgtttgtgtacatcaactctggctcgggagcagtaatgaatgcaatggaaacaaacctcgttggaagtgacaaatatgctgcaagatttggggaatctatagttaatcttggcgacattgacaatgatggctttgaagatgttgctatcggagctccacaagaagatgacttgcaaggtgctatttatatttacaatggccgtgcagatgggatctcgtcaaccttctcacagagaattgaaggacttcagatcagcaaatcgttaagtatgtttggacagtctatatcaggacaaattgatgcagataataatggctatgtagatgtagcagttggtgcttttcggtctgattctgctgtcttgctaaggacaagacctgtagtaattgttgacgcttctttaagccaccctgagtcagtaaatagaacgaaatttgactgtgttgaaaatggatggccttctgtgtgcatagatctaacactttgtttctcatataagggcaaggaagttccaggttacattgttttgttttataacatgagtttggatgtgaacagaaaggcagagtctccaccaagattctatttctcttctaatggaacttctgacgtgattacaggaagcatacaggtgtccagcagagaagctaactgtagaacacatcaagcatttatgcggaaagatgtgcgggacatcctcaccccaattcagattgaagctgcttaccaccttggtcctcatgtcatcagtaaacgaagtacagaggaattcccaccacttcagccaattcttcagcagaagaaagaaaaagacataatgaaaaaaacaataaactttgcaaggttttgtgcccatgaaaattgttctgctgatttacaggtttctgcaaagattgggtttttgaagccccatgaaaataaaacatatcttgctgttgggagtatgaagacattgatgttgaatgtgtccttgtttaatgctggagatgatgcatatgaaacgactctacatgtcaaactacccgtgggtctttatttcattaagattttagagctggaagagaagcaaataaactgtgaagtcacagataactctggcgtggtacaacttgactgcagtattggctatatatatgtagatcatctctcaaggatagatattagctttctcctggatgtgagctcactcagcagagcggaagaggacctcagtatcacagtgcatgctacctgtgaaaatgaagaggaaatggacaatctaaagcacagcagagtgactgtagcaatacctttaaaatatgaggttaagctgactgttcatgggtttgtaaacccaacttcatttgtgtatggatcaaatgatgaaaatgagcctgaaacgtgcatggtggagaaaatgaacttaactttccatgttatcaacactggcaatagtatggctcccaatgttagtgtggaaataatggtaccaaattcttttagcccccaaactgataagctgttcaacattttggatgtccagactactactggagaatgccactttgaaaattatcaaagagtgtgtgcattagagcagcaaaagagtgcaatgcagaccttgaaaggcatagtccagttcttgtccaagactgataagaggctattgtactgcataaaagctgatccacattgtttaaatttcttgtgtaattttgggaaaatggaaagtggaaaagaagccagtgttcatatccaactggaaggccggccatccattttagaaatggatgagacttcagcactcaagtttgaaataagagcaacaggttttccagagccaaatccaagagtaattgaactaaacaaggatgagaatgttgcgcatgttctactggaaggactacatcatcaaagacccaaacgttatttcaccatagtgattatttcaagtagcttgctacttggacttattgtacttctgttgatctcatatgttatgtggaaggctggcttctttaaaagacaatacaaatctatcctacaagaagaaaacagaagagacagttggagttatatcaacagtaaaagcaatgatgattaaggacttctttcaaattgagagaatggaaaacagcccgccc

SEQ ID NO: 127 - protein, 1038 aa, Homo sapiens [sequence omitted]

SEQ ID NO: 128 - DNA, 8743 bp, Homo sapiens
ggatcctctcgcctcggcctcctaaagtattgggattacaggcatgagcctctgtgcctggctgtaactgacatgttttaagcaggggaatgacatgctctagtgaaagccagtctgggcagctgggtagctaatgaggggattagagagattttgttgaatgaaaggcagattgagtcctgctactcgcccccttcattccccttcattcatgcctcattcttccgcctcccagccgcctcaactggccaaagggaagtggaggccctgccacctgtagggagggtcccctggggcttgcccacagcaaacaggaagtcacagcctggtgagatgggcctgggaatcagccactgagaaagtgggtctcttgggtccctgaattctttttctgagtccctgcagcagtgaaaaagacacagaggcacatagagagtgacagagaaagagagagacagagaggagaggcatggggcagaataagaacagatttaggagttagaactcctgggttcttttaaaacaatttttcttttagagacagggtcttgttgtgttgcccggactggagcacagtggctattcccaggcataatcatggtgcactgcagccttgaactcctgggctcaagcgatccttctacctcagcctcccaaggacctgggaccataggcgtgtaccactgtgcctggcttttgcctggttttaaactgaggcagtatgacttgagctcttaggcattaattgaagctgtatctcattaactgagggcttatgatgtgctggacactgggctaatagtgctgaacatattgtcatttttaatcttcacaaacaatatttgtataggactgttttcttttcttttttttttttgaaacagagtctcactctggtgcccaggctggagtgcagtggtgtgatctcggctcactgcaacctccgcctcctggtttccagtgattctcctgcctcagcctcctaagtagctgggattacaggtgtgcgccaccatgcccggctaatttttttttttttttttgagaaggagtctatgtgcccagcattgttctagagcacttgcaattagtggtgaacaacacggtctctactccaaggggctcacattcttgtgcagaaaacagaaatgaacaaataaacacacaagatcatttcccgtggtagtgagagctgggatgaaaataaaacagcgtggcagggaggaggcaagtgttgtgagtctggagggttcctggagaatggggcctgaggcgtgaccaccgccttcctctctggggggactgcctgccgcccccgcagacacccatggttgagtgccctccaggcccctgcctgccccagcatcccctgcgcgaagctgggtgccccggagagtctgaccaccatgccacctcctcgcctcctcttcttcctcctcttcctcacccccatggaagtcaggcccgaggaacctctagtggtgaaggtggaaggtatgtccaaagggcagaaagggaagggattgaggctggaaacttgagttgtggctgggtgtccttggctgagtaacttaccctctctgagcctccattttcttatttgtaaaattcaggaaagggttggaaggactctgccggctcctccactcccagcttttggagtcctctgctctataacctggtgtgaggagtcggggggcttggaggtcccccccacccatgcccacacctctctccctctctctccacagagggagataacgctgtgctgcagtgcctcaaggggacctcagatggccccactcagcagctgacctggtctcgggagtccccgcttaaacccttcttaaaactcagcctggggctgccaggcctgggaatccacatgaggcccctggcatcctggcttttcatcttcaacgtctctcaacagatggggggcttctacctgtgccagccggggcccccctctgagaaggcctggcagcctggctggacagtcaatgtggagggcagcggtgagggccgggctggggcaggggcaggaggagagaagggaggccaccatggacagaagaggtccgcggccacaatggagctggagagaggggctggagggattgagggcgaaactcggagctaggtgggcagactcctggggcttcgtggcttcagtatgagctgcttcctgtccctctacctctcactgtcttctctctctctgcgggtctttgtctctatttatctctgtctttgagtctctatctctctccctctcctgggtgtctctgcatttggttctgggtctcttcccaggggagctgttccggtggaatgtttcggacctaggtggcctgggctgtggcctgaagaacaggtcctcagagggccccagctccccttccgggaagctcatgagccccaagctgtatgtgtgggccaaagaccgccctgagatctgggagggagagcctccgtgtgtcccaccgagggacagcctgaaccagagcctcagccagggtatggtgatgactggggagatgccgggaagcgggggtccagagacagaggggaggggaaactgaagaggtgaaaccctgaggatcaggctttccttgtcttatctctccctgtcccagacctcaccatggcccctggctccacactctggctgtcctgtggggtaccccctgactctgtgtccaggggccccctctcctggacccatgtgcaccccaaggggcctaagtcattgctgagcctagagctgaaggacgatcgcccggccagagatatgtgggtaatggagacgggtctgttgttgccccgggccacagctcaagacgctggaaagtattattgtcaccgtggcaacctgaccatgtcattccacctggagatcactgctcggccaggtagagtttctctcaactgggaggcatctgtgtgggggtactgggaagaagtggaagccagtcaatcttagattcccccaacccgagggctactcccagcctcaccccaaaccccaacttccacacagaacactgactccaagtctttcttttttttgacagagtctcgctctgttgcctaggctggagtgcagtggtgccatcttgtcttggctcactgcaacctccgcctcccaggttcaagtgattcccctgcctcagcctcctgagtagctgggattacaggtgcccaccaccacgcctggctaattttttttttttttttgagacggagtcttgcactgtcacccaggctggagtgcagtggcacgatctcagctcactgcaacctccaccttccaggttcaagtgattctcctgcctcagcctcccgagtagctgggattaaagcctggctaattttttttgtatttttagtagagatggggtttcattatgttggccaggctggtctcaaactcctgacctcgtgatccacccgcctcggcctcccaaagtgctgggattacagacatgagccacagggccgggccaagcctaattttgtatttttagtagagatggggtttctccctgttggaccaggctggtcttgaactcctgacttcaggtgatctgcctgccttggcctcccaaagtactgggattacaggcataagccaccgcacctggcctagacttcaagtctttcttccctcgcttccaagacactacttttctgggtcttcacctaccattgcttgcgcctgcccaccagcttgggtggagtcttccttcctccccaactcctcactcttggagccctgggccctcttcttatccctgtctgcacactttcctatttgaacttgactctcaatggcttcttgggtcaccatgccttggtgactctattccaggctccatactcagccatctcctgtgccatttgatatcccatggacacctcaggctcaacagatacaaaatcaaactcaatgtcttccccaagtatagtcttcttggtggcccagtgtaagcagagggcaccaccacctgctccctcgcccaggctaagaacctgggcatccttctttttcctcaccccgtccaacaaactggtcacagtgttctgccaattctctctccatgcaatcctatcatgctatcctaactgcaattcacaaacccaaccccaactttcactccaaacttgatccaagcaatgtgctggatcccaactgtaaccttgcaaactcaactctgcccttcactttgaccgtgactatccttaattgcagcaggaaactgatcattatgctcccctcaatccacacattgcctctgagtacagccatggtttgtccacgatttgctcaaagacactgcccatgtcctgtgccagggtctgtgacaatccctgacctcctgggacatggctccttagagagaggagagcctttctcacagcttgggactttgagtctgtgtctttttttttttcttgagacggagttttgctgtggttgcccaggctggagtgcagtgatctcggctcactgaaacctccgcctcccgggttcaaacgattctcctgcctcagcctcccaagtagctgggattacaggcacccaccaccatgcccagctaatttttttgtatttttagtagagatggggtttcaccatgttggccaggctggtctcgaactcctgacctcaggtgatccacccgcctttgcctcccaaagtgctgggattacaggcgtcaaccaccgcgcccggccgagtctgtgtcttgcctctgtgcctcagacttgcggttccttgagatctcaggattgggacgtaagatgccagcctggggtcctcgtctcatagccccttccccctagtactatggcactggctgctgaggactggtggctggaaggtctcagctgtgactttggcttatctgatcttctgcctgtgttcccttgtgggcattcttcatcttcaaagaggtgagtcatgtccccagtgggtctgtccaaaccctactccatcttccccaggataagccggctctggccagtctgacaaccatctttctttcctcccatccctcccttcaagaccccagaatcctgttctccccagtcttcctctagcctccctcaaacttcccaagcctcttgcaattttttttttttttttgagacagggtctcattctgtcaccccagctggagtgcagtggcacaatctgagctcactgtaacctctgcctcccaggcttaagtgattcttgtgcttcagcctcccgagtacctgggactacaagtgtatgccaccacacccggccaattttttatatttttagtagagacgaggtttcaccatgttggccagactggtctcgaactcttgacctcaaatgatccgcccacctcggcctcccaaagtgctgggattacaggcacgagccaccgcgcccgtccgcctcgcaatttgaactcctgtctcctttgttgaaccaagtgacctccccagcacctggccccacaaatcctcaccctgccaagcagcccctcctctgatcacgccctttaactcccaccagccctggtcctgaggaggaaaagaaagcgaatgactgaccccaccaggaggtaatgcaaccagtgcaccccgcggtaacaccctccaccttcactttatgccttgcacttactgtttcctctgcccaggggttctttgctccgtctctactgtttcaaatactgcccaacctcaaagcccagctccaaagctacctcctctgtgaagaactccttggaaatgatcatctcagactcctctattggctgtcccagcacaagtgatcacgtttaacttctgaaggcctggacagaatcttgagtgggtccgccattccattccaagtcggccctcaccgtgcacttcctcttctcccgccagattcttcaaagtgacgcctcccccaggaagcgggccccagaaccagtacgggaacgtgctgtctctccccacacccacctcaggcctcggtaagaggcaccgcccctccagcctatagctccgccccagatccggggctccacccccactctcctcatccctccaatccgctgtgcgccaagccttctggagctcggaactccgcccccggggcggggagtcccgcccagctatgagccccgcctctagaaccagaccccgcctccagggctcagagccacgcccccaggacccagagcctgaagtcgtaatcaagagcagaacttcgccccagaactgaaggcctcggccctagatttagattccgccccagggttcaaggccgggttcctagacccagagtccattcgcagagcccaaaacatcctcttcccgtgccccgccgcgcggacccttagccttgaccgcccccatctcttctgaccccgtcttacaatgcccctctcaccaggacgcgcccagcgttgggccgcaggcctggggggcactgccccgtcttatggaaacccgagcagcgacgtccaggcggatggagccttggggtcccggagcccgccgggagtgggtgaatgactgggagagggaagggtcgttccccacatggagggggttggagcggtctgtggcccgaatagtggactgggccctggaggagagggggcatgactcggttccccatccccatccccaaacccccaggcccagaagaagaggaaggggagggctatgaggaacctgacagtgaggaggactccgagttctatgagaacgactccaaccttgggcaggaccagctctcccagggtaaggctgccctcccccgtggccccccacctctgcggtggcctgtggactcccatggacacccctccttctacaccagatggcagcggctacgagaaccctgaggatgagcccctgggtcctgaggatgaagactccttctccaacggtaacttggggcctttgtgggacctcagagacttaggtgtaattgcagcgctgtgacactcctagaaggggatccctggagttctctctcttctgccacagctgagtcttatgagaacgaggatgaagagctgacccagccggtcgccaggacaatgggtgtgtgtgaggatggcaacagtccaggggggaggcggaggacacctggaggccaggaggaatagtaacctccctcttccctttccagacttcctgagccctcatgggtcagcctgggaccccagccgggaagcaacctccctgggtgagagatgctttcaatcagactgccttgcccagcttgggtgacctggcctcagctctgacaccagatccaactttgacctgaccctgaccccaaacccgaacccaatcctgtgactcctctcacctcaacactgagccccatcccccatcctgagccccatcccccatcctgacccccaatatttaccccctccctaactgtgaatatcaacaccgatcccaatgcagtatcagcctggacttgatctccacctcacctcagccccagtgcagacctcaacttggaccccagcttactctgcagcttcttcatgactctgactccgactccctccagtttcttctttttctttttcttttttttgagacggagtctccctctgttgcccaggctggagtgcagttgccacctctgcctcctaggttcaagcgattctcatgcctcagcctcctgagtagctgggattatagacgtttgccaccacacctggctaatttttgtattttcagtagagacagggtttcgccatgttggccagactggtctccaactcctggcctctagtgatctgcccgcctttggcttcccaaagtgctgggattacaggcatgagccaccacgcccagcccagttctgttcttgaccccttccttagccataatctaacccatatctaaccctgaccctacagctaactggggccccaaactcaatgctaaccaaatcaccccttcccagcacagcatgggtaatgctcctcaccttcctctgcccctcagtcttcctccttaccgtaggctgtacttcccatgccctagcctccaattctccatcccccgcccaagcagggtcccagtcctatgaggatatgagaggaatcctgtatgcagccccccagctccgctccattcggggccagcctggacccaatcatgaggaaggtgggtgcttctgccgctgtcccctgctgtcccctgggctgactttgccttccagcctacttccagtgccacccatgttctcctcctccctggtcctatccagatgcagactcttatgagaacatggataatcccgatgggccagacccagcctggggaggagggggccgcatgggcacctggagcaccaggtgatcctcaggtggccaggtgagctgggactgcccctagggaaagcggggagggagggagataggcacggatggcagtggctgctggctttcagggagggagagggaacagggttcctagggcctggtgggcagggggaggactgctggacccctccccatcaccgtttcttctgcatagcctggatctcctcaagtccccaagattcacacctgactctgaaatctgaagacctcgagcagatgatgccaacctctggagcaatgttgcttaggatgtgtgcatgtgtgtaagtgtgtgtgtgtgtgtgtgtgtgtatacatgccagtgacacttccagtcccctttgtattccttaaataaactcaatgagctc

SEQ ID NO: 129 - protein, 556 aa, Homo sapiens [sequence omitted]

SEQ ID NO: 130 - DNA, 1146 bp, Homo sapiens
cctcaatgacactcatggaggaaatgctgagagaagcattcagatgcatgacacaaggtaagactgccaaaaatcttgttcttgctctcctcattttgttatttgttttatttttaggagttttgagagcaaaatgacaacacccagaaattcagtaaatgggactttcccggcagagccaatgaaaggccctattgctatgcaatctggtccaaaaccactcttcaggaggatgtcttcactggtgggccccacgcaaagcttcttcatgagggaatctaagactttgggggctgtccagattatgaatgggctcttccacattgccctggggggtcttctgatgatcccagcagggatctatgcacccatctgtgtgactgtgtggtaccctctctggggaggcattatgtatattatttccggatcactcttggcagcaacggagaaaaactctaggaagtgtttggtcaaaggaaaaatgataatgaattcattgagcctctttgctgccatttctggaatgattctttcaatcatggacatacttaatattaaaatttcccattttttaaaaatggagagtctgaattttattagagctcacacaccatatattaacatatacaactgtgaaccagctaatccctctgagaaaaactccccatctacccaatactgttacagcatacaatctctgttcttgggcattttgtcagtgatgctgatctttgccttcttccaggaacttgtaatagctggcatcgttgagaatgaatggaaaagaacgtgctccagacccaaatctaacatagttctcctgtcagcagaagaaaaaaaagaacagactattgaaataaaagaagaagtggttgggctaactgaaacatcttcccaaccaaagaatgaagaagacattgaaattattccaatccaagaagaggaagaagaagaaacagagacgaactttccagaacctccccaagatcaggaatcctcaccaatagaaaatgacagctctccttaagtgatttcttctgttttctgtttccttttttaaacattagtgttcatagcttccaagagacatgctgactttcatttcttgaggtactctgcacatacgcaccacatctctatctggcc

SEQ ID NO: 131 - protein, 297 aa, Homo sapiens
MTTPRNSVNGTFPAEPMKGPIAMQSGPKPLFRRMSSLVGPTQSFFMRESKTLGAVQIMNGLFHIALGGLLMIPAGIYAPICVTVWYPLWGGIMYIISGSLLAATEKNSRKCLVKGKMIMNSLSLFAAISGMILSIMDILNIKISHFLKMESLNFIRAHTPYINIYNCEPANPSEKNSPSTQYCYSIQSLFLGILSVMLIFAFFQELVIAGIVENEWKRTCSRPKSNIVLLSAEEKKEQTIEIKEEVVGLTETSSQPKNEEDIEIIPIQEEEEEETETNFPEPPQDQESSPIENDSSP

SEQ ID NO: 132 - DNA, 3260 bp, Homo sapiens
ccatcccatagtgagggaagacacgcggaaacaggcttgcacccagacacgacaccatgcatctcctcggcccctggctcctgctcctggttctagaatacttggctttctctgactcaagtaaatgggtttttgagcaccctgaaaccctctacgcctgggagggggcctgcgtctggatcccctgcacctacagagccctagatggtgacctggaaagcttcatcctgttccacaatcctgagtataacaagaacacctcgaagtttgatgggacaagactctatgaaagcacaaaggatgggaaggttccttctgagcagaaaagggtgcaattcctgggagacaagaataagaactgcacactgagtatccacccggtgcacctcaatgacagtggtcagctggggctgaggatggagtccaagactgagaaatggatggaacgaatacacctcaatgtctctgaaaggccttttccacctcatatccagctccctccagaaattcaagagtcccaggaagtcactctgacctgcttgctgaatttctcctgctatgggtatccgatccaattgcagtggctcctagagggggttccaatgaggcaggctgctgtcacctcgacctccttgaccatcaagtctgtcttcacccggagcgagctcaagttctccccacagtggagtcaccatgggaagattgtgacctgccagcttcaggatgcagatgggaagttcctctccaatgacacggtgcagctgaacgtgaagcacaccccgaagttggagatcaaggtcactcccagtgatgccatagtgagggagggggactctgtgaccatgacctgcgaggtcagcagcagcaacccggagtacacgacggtatcctggctcaaggatgggacctcgctgaagaagcagaatacattcacgctaaacctgcgcgaagtgaccaaggaccagagtgggaagtactgctgtcaggtctccaatgacgtgggcccgggaaggtcggaagaagtgttcctgcaagtgcagtatgccccggaaccttccacggttcagatcctccactcaccggctgtggagggaagtcaagtcgagtttctttgcatgtcactggccaatcctcttccaacaaattacacgtggtaccacaatgggaaagaaatgcagggaaggacagaggagaaagtccacatcccaaagatcctcccctggcacgctgggacttattcctgtgtggcagaaaacattcttggtactggacagaggggcccgggagctgagctggatgtccagtatcctcccaagaaggtgaccacagtgattcaaaaccccatgccgattcgagaaggagacacagtgaccctttcctgtaactacaattccagtaaccccagtgttacccggtatgaatggaaaccccatggcgcctgggaggagccatcgcttggggtgctgaagatccaaaacgttggctgggacaacacaaccatcgcctgcgcacgttgtaatagttggtgctcgtgggcctcccctgtcgccctgaatgtccagtatgccccccgagacgtgagggtccggaaaatcaagcccctttccgagattcactctggaaactcggtcagcctccaatgtgacttctcaagcagccaccccaaagaagtccagttcttctgggagaaaaatggcaggcttctggggaaagaaagccagctgaattttgactccatctccccagaagatgctgggagttacagctgctgggtgaacaactccataggacagacagcgtccaaggcctggacacttgaagtgctgtatgcacccaggaggctgcgtgtgtccatgagcccgggggaccaagtgatggaggggaagagtgcaaccctgacctgtgagagtgacgccaaccctcccgtctcccactacacctggtttgactggaataaccaaagcctcccccaccacagccagaagctgagattggagccggtgaaggtccagcactcgggtgcctactggtgccaggggaccaacagtgtgggcaagggccgttcgcctctcagcacccttactgtctactatagcccggagaccatcggcaggcgagtggctgtgggactcgggtcctgcctcgccatcctcatcctggcaatctgtgggctcaagctccagcgacgttggaagaggacacagagccagcaggggcttcaggagaattccagcggccagagcttctttgtgaggaataaaaaggttagaagggcccccctctctgaaggcccccactccctgggatgctacaatccaatgatggaagatggcattagctacaccaccctgcgctttcccgagatgaacataccacgaactggagatgcagagtcctcagagatgcagagacctccccggacctgcgatgacacggtcacttattcagcattgcacaagcgccaagtgggcgactatgagaacgtcattccagattttccagaagatgaggggattcattactcagagctgatccagtttggggtcggggagcggcctcaggcacaagaaaatgtggactatgtgatcctcaaacattgacactggatgggctgcagcagaggcactgggggcagcgggggccagggaagtccccgagtttccccagacaccgccacatggcttcctcctgcgtgcatgtgcgcacacacacacacacacgcacacacacacacacacactcactgcggagaaccttgtgcctggctcagagccagtctttttggtgagggtaaccccaaacctccaaaactcctgcccctgttctcttccactctccttgctacccagaaatcatctaaatacctgccctgacatgcacacctcccctgccccaccagcccactggccatctccacccggagctgctgtgtcctctggatctgctcgtcattttccttcccttctccatctctctggccctctacccctgatctgacatccccactcacgaatattatgcccagtttctgcctctgagggaaagcccagaaaaggacagaaacgaagtagaaaggggcccagtcctggcctggcttctcctttggaagtgaggcattgcacggggagacgtacgtatcagcggccccttgactctggggactccgggtttgagatggacacactggtgtggattaacctgccagggagacagagctcacaataaaaatggctcagatgccacttcaaagaaaaaaaaaa

SEQ ID NO: 133 - protein, 847 aa, Homo sapiens
MHLLGPWLLLLVLEYLAFSDSSKWVFEHPETLYAWEGACVWIPCTYRALDGDLESFILFHNPEYNKNTSKFDGTRLYESTKDGKVPSEQKRVQFLGDKNKNCTLSIHPVHLNDSGQLGLRMESKTEKWMERIHLNVSERPFPPHIQLPPEIQESQEVTLTCLLNFSCYGYPIQLQWLLEGVPMRQAAVTSTSLTIKSVFTRSELKFSPQWSHHGKIVTCQLQDADGKFLSNDTVQLNVKHTPKLEIKVTPSDAIVREGDSVTMTCEVSSSNPEYTTVSWLKDGTSLKKQNTFTLNLREVTKDQSGKYCCQVSNDVGPGRSEEVFLQVQYAPEPSTVQILHSPAVEGSQVEFLCMSLANPLPTNYTWYHNGKEMQGRTEEKVHIPKILPWHAGTYSCVAENILGTGQRGPGAELDVQYPPKKVTTVIQNPMPIREGDTVTLSCNYNSSNPSVTRYEWKPHGAWEEPSLGVLKIQNVGWDNTTIACARCNSWCSWASPVALNVQYAPRDVRVRKIKPLSEIHSGNSVSLQCDFSSSHPKEVQFFWEKNGRLLGKESQLNFDSISPEDAGSYSCWVNNSIGQTASKAWTLEVLYAPRRLRVSMSPGDQVMEGKSATLTCESDANPPVSHYTWFDWNNQSLPHHSQKLRLEPVKVQHSGAYWCQGTNSVGKGRSPLSTLTVYYSPETIGRRVAVGLGSCLAILILAICGLKLQRRWKRTQSQQGLQENSSGQSFFVRNKKVRRAPLSEGPHSLGCYNPMMEDGISYTTLRFPEMNIPRTGDAESSEMQRPPRTCDDTVTYSALHKRQVGDYENVIPDFPEDEGIHYSELIQFGVGERPQAQENVDYVILKH

SEQ ID NO: 134 - DNA, 1906 bp, Homo sapiens
ccaagtcacatgattcaggattcagggggagaatccttcttggaacagagatgggcccagaactgaatcagatgaagagagataaggtgtgatgtggggaagactatataaagaatggacccagggctgcagcaagcactcaacggaatggcccctcctggagacacagccatgcatgtgccggcgggctccgtggccagccacctggggaccacgagccgcagctatttctatttgaccacagccactctggctctgtgccttgtcttcacggtggccactattatggtgttggtcgttcagaggacggactccattcccaactcacctgacaacgtccccctcaaaggaggaaattgctcagaagacctcttatgtatcctgaaaagagctccattcaagaagtcatgggcctacctccaagtggcaaagcatctaaacaaaaccaagttgtcttggaacaaagatggcattctccatggagtcagatatcaggatgggaatctggtgatccaattccctggtttgtacttcatcatttgccaactgcagtttcttgtacaatgcccaaataattctgtcgatctgaagttggagcttctcatcaacaagcatatcaaaaaacaggccctggtgacagtgtgtgagtctggaatgcaaacgaaacacgtataccagaatctctctcaattcttgctggattacctgcaggtcaacaccaccatatcagtcaatgtggatacattccagtacatagatacaagcacctttcctcttgagaatgtgttgtccatcttcttatacagtaattcagactgaacagtttctcttggccttcaggaagaaagcgcctctctaccatacagtatttcatccctccaaacacttgggcaaaaagaaaactttagaccaagacaaactacacagggtattaaatagtatacttctccttctgtctcttggaaagatacagctccagggttaaaaagagagtttttagtgaagtatctttcagatagcaggcagggaagcaatgtagtgtggtgggcagagccccacacagaatcagaagggatgaatggatgtcccagcccaaccactaattcactgtatggtcttgatctatttcttctgttttgagagcctccagttaaaatggggcttcagtaccagagcagctagcaactctgccctaatgggaaatgaaggggagctgggtgtgagtgtttacactgtgcccttcacgggatacttcttttatctgcagatggcctaatgcttagttgtccaagtcgcgatcaaggactctctcacacaggaaacttccctatactggcagatacacttgtgactgaaccatgcccagtttatgcctgtctgactgtcactctggcactaggaggctgatcttgtactccatatgaccccacccctaggaacccccagggaaaaccaggctcggacagccccctgttcctgagatggaaagcacaaatttaatacaccaccacaatggaaaacaagttcaaagacttttacttacagatcctggacagaaagggcataatgagtctgaagggcagtcctccttctccaggttacatgaggcaggaataagaagtcagacagagacagcaagacagttaacaacgtaggtaaagaaatagggtgtggtcactctcaattcactggcaaatgcctgaatggtctgtctgaaggaagcaacagagaagtggggaatccagtctgctaggcaggaaagatgcctctaagttcttgtctctggccagaggtgtggtatagaaccagaaacccatatcaagggtgactaagcccggcttccggtatgagaaattaaacttgtatacaaaatggttgccaaggcaacataaaattataagaattc

SEQ ID NO: 135 - protein, 234 aa, Homo sapiens
MDPGLQQALNGMAPPGDTAMHVPAGSVASHLGTTSRSYFYLTTATLALCLVFTVATIMVLVVQRTDSIPNSPDNVPLKGGNCSEDLLCILKRAPFKKSWAYLQVAKHLNKTKLSWNKDGILHGVRYQDGNLVIQFPGLYFIICQLQFLVQCPNNSVDLKLELLINKHIKKQALVTVCESGMQTKHVYQNLSQFLLDYLQVNTTISVNVDTFQYIDTSTFPLENVLSIFLYSNSD

SEQ ID NO: 136 - DNA, 1125 bp, Homo sapiens
gtctcccccactgtcagcacctcttctgtgtggtgagtggaccgcttaccccactaggtgaagatgtcagcccaggagagctgcctcagcctcatcaagtacttcctcttcgttttcaacctcttcttcttcgtcctcggcagcctgatcttctgcttcggcatctggatcctcatcgacaagaccagcttcgtgtcctttgtgggcttggccttcgtgcctctgcagatctggtccaaagtcctggccatctcaggaatcttcaccatgggcatcgccctcctgggttgtgtgggggccctcaaggagctccgctgcctcctgggcctgtattttgggatgctgctgctcctgtttgccacacagatcaccctgggaatcctcatctccactcagcgggcccagctggagcgaagcttgcgggacgtcgtagagaaaaccatccaaaagtacggcaccaaccccgaggagaccgcggccgaggagagctgggactatgtgcagttccagctgcgctgctgcggctggcactacccgcaggactggttccaagtcctcatcctgagaggtaacgggtcggaggcgcaccgcgtgccctgctcctgctacaacttgtcggcgaccaacgactccacaatcctagataaggtgatcttgccccagctcagcaggcttggacacctggcgcggtccagacacagtgcagacatctgcgctgtccctgcagagagccacatctaccgcgagggctgcgcgcagggcctccagaagtggctgcacaacaaccttatttccatagtgggcatttgcctgggcgtcggcctactcgagctcgggttcatgacgctctcgatattcctgtgcagaaacctggaccacgtctacaaccggctcgctcgataccgttaggccccgccctccccaaagtcccgccccgcccccgtcacgtgcgctgggcacttccctgctgcctgtaaatatttgtttaatccccagttcgcctggagccctccgccttcacattcccctggggacccacgtggctgcgtgcccctgctgctgtcacctctcccacgggacctggggctttcgtccacagcttcctgtccccatctgtcggcctac

SEQ ID NO: 137 - protein, 281 aa, Homo sapiens
MSAQESCLSLIKYFLFVFNLFFFVLGSLIFCFGIWILIDKTSFVSFVGLAFVPLQIWSKVLAISGIFTMGIALLGCVGALKELRCLLGLYFGMLLLLFATQITLGILISTQRAQLERSLRDVVEKTIQKYGTNPEETAAEESWDYVQFQLRCCGWHYPQDWFQVLILRGNGSEAHRVPCSCYNLSATNDSTILDKVILPQLSRLGHLARSRHSADICAVPAESHIYREGCAQGLQKWLHNNLISIVGICLGVGLLELGFMTLSIFLCRNLDHVYNRLARYR

SEQ ID NO: 138 - DNA, 2220 bp, Homo sapiens
atgcctgggaagatggtcgtgatccttggagcctcaaatatactttggataatgtttgcagcttctcaagcttttaaaatcgagaccaccccagaatctagatatcttgctcagattggtgactccgtctcattgacttgcagcaccacaggctgtgagtccccatttttctcttggagaacccagatagatagtccactgaatgggaaggtgacgaatgaggggaccacatctacgctgacaatgaatcctgttagttttgggaacgaacactcttacctgtgcacagcaacttgtgaatctaggaaattggaaaaaggaatccaggtggagatctactcttttcctaaggatccagagattcatttgagtggccctctggaggctgggaagccgatcacagtcaagtgttcagttgctgatgtatacccatttgacaggctggagatagacttactgaaaggagatcatctcatgaagagtcaggaatttctggaggatgcagacaggaagtccctggaaaccaagagtttggaagtaacctttactcctgtcattgaggatattggaaaagttcttgtttgccgagctaaattacacattgatgaaatggattctgtgcccacagtaaggcaggctgtaaaagaattgcaagtctacatatcacccaagaatacagttatttctgtgaatccatccacaaagctgcaagaaggtggctctgtgaccatgacctgttccagcgagggtctaccagctccagagattttctggagtaagaaattagataatgggaatctacagcacctttctggaaatgcaactctcaccttaattgctatgaggatggaagattctggaatttatgtgtgtgaaggagttaatttgattgggaaaaacagaaaagaggtggaattaattgttcaagagaaaccatttactgttgagatctcccctggaccccggattgctgctcagattggagactcagtcatgttgacatgtagtgtcatgggctgtgaatccccatctttctcctggagaacccagatagacagccctctgagcgggaaggtgaggagtgaggggaccaattccacgctgaccctgagccctgtgagttttgagaacgaacactcttatctgtgcacagtgacttgtggacataagaaactggaaaagggaatccaggtggagctctactcattccctagagatccagaaatcgagatgagtggtggcctcgtgaatgggagctctgtcactgtaagctgcaaggttcctagcgtgtacccccttgaccggctggagattgaattacttaagggggagactattctggagaatatagagtttttggaggatacggatatgaaatctctagagaacaaaagtttggaaatgaccttcatccctaccattgaagatactggaaaagctcttgtttgtcaggctaagttacatattgatgacatggaattcgaacccaaacaaaggcagagtacgcaaacactttatgtcaatgttgcccccagagatacaaccgtcttggtcagcccttcctccatcctggaggaaggcagttctgtgaatatgacatgcttgagccagggctttcctgctccgaaaatcctgtggagcaggcagctccctaacggggagctacagcctctttctgagaatgcaactctcaccttaatttctacaaaaatggaagattctggggtttatttatgtgaaggaattaaccaggctggaagaagcagaaaggaagtggaattaattatccaagttactccaaaagacataaaacttacagcttttccttctgagagtgtcaaagaaggagacactgtcatcatctcttgtacatgtggaaatgttccagaaacatggataatcctgaagaaaaaagcggagacaggagacacagtactaaaatctatagatggcgcctataccatccgaaaggcccagttgaaggatgcgggagtatatgaatgtgaatctaaaaacaaagttggctcacaattaagaagtttaacacttgatgttcaaggaagagaaaacaacaaagactatttttctcctgagcttctcgtgctctattttgcatcctccttaataatacctgccattggaatgataatttactttgcaagaaaagccaacatgaaggggtcatatagtcttgtagaagcacagaaatcaaaagtgtag

SEQ ID NO: 139 - protein, 739 aa, Homo sapiens
MPGKMVVILGASNILWIMFAASQAFKIETTPESRYLAQIGDSVSLTCSTTGCESPFFSWRTQIDSPLNGKVTNEGTTSTLTMNPVSFGNEHSYLCTATCESRKLEKGIQVEIYSFPKDPEIHLSGPLEAGKPITVKCSVADVYPFDRLEIDLLKGDHLMKSQEFLEDADRKSLETKSLEVTFTPVIEDIGKVLVCRAKLHIDEMDSVPTVRQAVKELQVYISPKNTVISVNPSTKLQEGGSVTMTCSSEGLPAPEIFWSKKLDNGNLQHLSGNATLTLIAMRMEDSGIYVCEGVNLIGKNRKEVELIVQEKPFTVEISPGPRIAAQIGDSVMLTCSVMGCESPSFSWRTQIDSPLSGKVRSEGTNSTLTLSPVSFENEHSYLCTVTCGHKKLEKGIQVELYSFPRDPEIEMSGGLVNGSSVTVSCKVPSVYPLDRLEIELLKGETILENIEFLEDTDMKSLENKSLEMTFIPTIEDTGKALVCQAKLHIDDMEFEPKQRQSTQTLYVNVAPRDTTVLVSPSSILEEGSSVNMTCLSQGFPAPKILWSRQLPNGELQPLSENATLTLISTKMEDSGVYLCEGINQAGRSRKEVELIIQVTPKDIKLTAFPSESVKEGDTVIISCTCGNVPETWIILKKKAETGDTVLKSIDGAYTIRKAQLKDAGVYECESKNKVGSQLRSLTLDVQGRENNKDYFSPELLVLYFASSLIIPAIGMIIYFARKANMKGSYSLVEAQKSKV

SEQ ID NO: 140 - DNA, 2986 bp, Homo sapiens
gcgccccagtcgacgctgagctcctctgctactcagagttgcaacctcagcctcgctatggctcccagcagcccccggcccgcgctgcccgcactcctggtcctgctcggggctctgttcccaggacctggcaatgcccagacatctgtgtccccctcaaaagtcatcctgccccggggaggctccgtgctggtgacatgcagcacctcctgtgaccagcccaagttgttgggcatagagaccccgttgcctaaaaaggagttgctcctgcctgggaacaaccggaaggtgtatgaactgagcaatgtgcaagaagatagccaaccaatgtgctattcaaactgccctgatgggcagtcaacagctaaaaccttcctcaccgtgtactggactccagaacgggtggaactggcacccctcccctcttggcagccagtgggcaagaaccttaccctacgctgccaggtggagggtggggcaccccgggccaacctcaccgtggtgctgctccgtggggagaaggagctgaaacgggagccagctgtgggggagcccgctgaggtcacgaccacggtgctggtgaggagagatcaccatggagccaatttctcgtgccgcactgaactggacctgcggccccaagggctggagctgtttgagaacacctcggccccctaccagctccagacctttgtcctgccagcgactcccccacaacttgtcagcccccgggtcctagaggtggacacgcaggggaccgtggtctgttccctggacgggctgttcccagtctcggaggcccaggtccacctggcactgggggaccagaggttgaaccccacagtcacctatggcaacgactccttctcggccaaggcctcagtcagtgtgaccgcagaggacgagggcacccagcggctgacgtgtgcagtaatactggggaaccagagccaggagacactgcagacagtgaccatctacagctttccggcgcccaacgtgattctgacgaagccagaggtctcagaagggaccgaggtgacagtgaagtgtgaggcccaccctagagccaaggtgacgctgaatggggttccagcccagccactgggcccgagggcccagctcctgctgaaggccaccccagaggacaacgggcgcagcttctcctgctctgcaaccctggaggtggccggccagcttatacacaagaaccagacccgggagcttcgtgtcctgtatggcccccgactggacgagagggattgtccgggaaactggacgtggccagaaaattcccagcagactccaatgtgccaggcttgggggaacccattgcccgagctcaagtgtctaaaggatggcactttcccactgcccatcggggaatcagtgactgtcactcgagatcttgagggcacctacctctgtcgggccaggagcactcaaggggaggtcacccgcgaggtgaccgtgaatgtgctctccccccggtatgagattgtcatcatcactgtggtagcagccgcagtcataatgggcactgcaggcctcagcacgtacctctataaccgccagcggaagatcaagaaatacagactacaacaggcccaaaaagggacccccatgaaaccgaacacacaagccacgcctccctgaacctatcccgggacagggcctcttcctcggccttcccatattggtggcagtggtgccacactgaacagagtggaagacatatgccatgcagctacacctaccggccctgggacgccggaggacagggcattgtcctcagtcagatacaacagcatttggggccatggtacctgcacacctaaaacactaggccacgcatctgatctgtagtcacatgactaagccaagaggaaggagcaagactcaagacatgattgatggatgttaaagtctagcctgatgagaggggaagtggtgggggagacatagccccaccatgaggacatacaactgggaaatactgaaacttgctgcctattgggtatgctgaggcccacagacttacagaagaagtggccctccatagacatgtgtagcatcaaaacacaaaggcccacacttcctgacggatgccagcttgggcactgctgtctactgaccccaacccttgatgatatgtatttattcatttgttattttaccagctatttattgagtgtcttttatgtaggctaaatgaacataggtctctggcctcacggagctcccagtccatgtcacattcaaggtcaccaggtacagttgtacaggttgtacactgcaggagagtgcctggcaaaaagatcaaatggggctgggacttctcattggccaacctgcctttccccagaaggagtgatttttctatcggcacaaaagcactatatggactggtaatggttcacaggttcagagattacccagtgaggccttattcctcccttccccccaaaactgacacctttgttagccacctccccacccacatacatttctgccagtgttcacaatgacactcagcggtcatgtctggacatgagtgcccagggaatatgcccaagctatgccttgtcctcttgtcctgtttgcatttcactgggagcttgcactattgcagctccagtttcctgcagtgatcagggtcctgcaagcagtggggaagggggccaaggtattggaggactccctcccagctttggaagggtcatccgcgtgtgtgtgtgtgtgtatgtgtagacaagctctcgctctgtcacccaggctggagtgcagtggtgcaatcatggttcactgcagtcttgaccttttgggctcaagtgatcctcccacctcagcctcctgagtagctgggaccataggctcacaacaccacacctggcaaatttgattttttttttttttttcagagacggggtctcgcaacattgcccagacttcctttgtgttagttaataaagctttctcaactgcc

SEQ ID NO: 141 - protein, 532 aa, Homo sapiens
MAPSSPRPALPALLVLLGALFPGPGNAQTSVSPSKVILPRGGSVLVTCSTSCDQPKLLGIETPLPKKELLLPGNNRKVYELSNVQEDSQPMCYSNCPDGQSTAKTFLTVYWTPERVELAPLPSWQPVGKNLTLRCQVEGGAPRANLTVVLLRGEKELKREPAVGEPAEVTTTVLVRRDHHGANFSCRTELDLRPQGLELFENTSAPYQLQTFVLPATPPQLVSPRVLEVDTQGTVVCSLDGLFPVSEAQVHLALGDQRLNPTVTYGNDSFSAKASVSVTAEDEGTQRLTCAVILGNQSQETLQTVTIYSFPAPNVILTKPEVSEGTEVTVKCEAHPRAKVTLNGVPAQPLGPRAQLLLKATPEDNGRSFSCSATLEVAGQLIHKNQTRELRVLYGPRLDERDCPGNWTWPENSQQTPMCQAWGNPLPELKCLKDGTFPLPIGESVTVTRDLEGTYLCRARSTQGEVTREVTVNVLSPRYEIVIITVVAAAVIMGTAGLSTYLYNRQRKIKKYRLQQAQKGTPMKPNTQATPP

SEQ ID NO: 142 - DNA, 591 bp, Mus musculus
atgtcgcaaggcctccagctcctgtttctaggctgcgcctgcagcctggcacccgcgatggcgatgcgggaggtgacggtggcttgctccgagaccgccgacttgccttgcacagcgccctgggacccgcagctctcctatgcagtgtcctgggccaaggtctccgagagtggcactgagagtgtggagctcccggagagcaagcaaaacagctccttcgaggcccccaggagaagggcctattccctgacgatccaaaacactaccatctgcagctcgggcacctacaggtgtgccctgcaggagctcggagggcagcgcaacttgagcggcaccgtggttctgaaggtgacaggatgccccaaggaagctacagagtcaactttcaggaagtacagggcagaagctgtgttgctcttctctctggttgttttctacctgacactcatcattttcacctgcaaatttgcacgactacaaagcattttcccagatatttctaaacctggtacggaacaagcttttcttccagtcacctccccaagcaaacatttggggccagtgacccttcctaagacagaaacggtatga

SEQ ID NO: 143 - protein, 196 aa, Mus musculus
MSQGLQLLFLGCACSLAPAMAMREVTVACSETADLPCTAPWDPQLSYAVSWAKVSESGTESVELPESKQNSSFEAPRRRAYSLTIQNTTICSSGTYRCALQELGGQRNLSGTVVLKVTGCPKEATESTFRKYRAEAVLLFSLVVFYLTLIIFTCKFARLQSIFPDISKPGTEQAFLPVTSPSKHLGPVTLPKTETV

SEQ ID NO: 144 - DNA, 6928 bp, Homo sapiens
ggcgggagcgcgtgcgcccgaggacccggccggaaggcttgcgccagctcaggatgaggacaggctgggcgacccctcgccgcccggcggggctcctcatgctgctcttctggttcttcgatctcgcggagccctctggccgcgcagctaatgaccccttcaccatcgtccatggaaatacgggcaagtgcatcaagccagtgtatggctggatagtagcagacgactgtgatgaaactgaggacaagttatggaagtgggtgtcccagcatcggctctttcatttgcactcccaaaagtgccttggcctcgatattaccaaatcggtaaatgagctgagaatgttcagctgtgactccagtgccatgctgtggtggaaatgtgagcaccactctctgtacggagctgcccggtaccggctggctctgaaggatggacatggcacagcaatctcaaatgcatctgatgtctggaagaaaggaggctcagaggaaagcctttgtgaccagccttatcatgagatctataccagagatgggaactcttatgggagaccttgtgaatttccattcttaattgatgggacctggcatcatgattgcattcttgatgaagatcatagtgggccatggtgtgccaccaccttaaattatgaatatgaccgaaagtggggcatctgcttaaagcctgaaaacggttgtgaagataattgggaaaagaacgagcagtttggaagttgctaccaatttaatactcagacggctctttcttggaaagaagcttatgtttcatgtcagaatcaaggagctgatttactgagcatcaacagtgctgctgaattaacttaccttaaagaaaaagaaggcattgctaagattttctggattggtttaaatcagctatactctgctagaggctgggaatggtcagaccacaaaccattaaactttctcaactgggatccagacaggcccagtgcacctactataggtggctccagctgtgcaagaatggatgctgagtctggtctgtggcagagcttttcctgtgaagctcaactgccctatgtctgcaggaaaccattaaataatacagtggagttaacagatgtctggacatactcagatacccgctgtgatgcaggctggctgccaaataatggattttgctatctgctggtaaatgaaagtaattcctgggataaggcacatgcgaaatgcaaagccttcagtagtgacctaatcagcattcattctctagcagatgtggaggtggttgtcacaaaactccataatgaggatatcaaagaagaagtgtggataggccttaagaacataaacataccaactttatttcagtggtcagatggtactgaagttactctaacatattgggatgagaatgagccaaatgttccctacaataagacgcccaactgtgtttcctacttaggagagctaggtcagtggaaagtccaatcatgtgaggagaaactaaaatatgtatgcaagagaaagggagaaaaactgaatgacgcaagttctgataagatgtgtcctccagatgagggctggaagagacatggagaaacctgttacaagatttatgaggatgaggtcccttttggaacaaactgcaatctgactatcactagcagatttgagcaagaatacctaaatgatttgatgaaaaagtatgataaatctctaagaaaatacttctggactggcctgagagatgtagattcttgtggagagtataactgggcaactgttggtggaagaaggcgggctgtaaccttttccaactggaattttcttgagccagcttccccgggcggctgcgtggctatgtctactggaaagtctgttggaaagtgggaggtgaaggactgcagaagcttcaaagcactttcaatttgcaagaaaatgagtggaccccttgggcctgaagaagcatcccctaagcctgatgacccctgtcctgaaggctggcagagtttccccgcaagtctttcttgttataaggtattccatgcagaaagaattgtaagaaagaggaactgggaagaagctgaacgattctgccaagcccttggagcacacctttctagcttcagccatgtggatgaaataaaggaatttcttcactttttaacggaccagttcagtggccagcattggctgtggattggtttgaataaaaggagcccagatttacaaggatcctggcaatggagtgatcgtacaccagtgtctactattatcatgccaaatgagtttcagcaggattatgacatcagagactgtgctgctgtcaaggtatttcataggccatggcgaagaggctggcatttctatgatgatagagaatttatttatttgaggccttttgcttgtgatacaaaacttgaatgggtgtgccaaattccaaaaggccgtactccaaaaacaccagactggtacaatccagaccgtgctggaattcatggacctccacttataattgaaggaagtgaatattggtttgttgctgatcttcacctaaactatgaagaagccgtcctgtactgtgccagcaatcacagctttcttgcgactataacatcttttgtgggactaaaagccatcaaaaacaaaatagcaaatatatctggtgatggacagaagtggtggataagaattagcgagtggccaatagatgatcattttacatactcacgatatccatggcaccgctttcctgtgacatttggagaggaatgcttgtacatgtctgccaagacttggcttatcgacttaggtaaaccaacagactgtagtaccaagttgcccttcatctgtgaaaaatataatgtttcttcgttagagaaatacagcccagattctgcagctaaagtgcaatgttctgagcaatggattccttttcagaataagtgttttctaaagatcaaacccgtgtctctcacattttctcaagcaagcgatacctgtcactcctatggtggcacccttccttcagtgttgagccagattgaacaagactttattacatccttgcttccggatatggaagctactttatggattggtttgcgctggactgcctatgaaaagataaacaaatggacagataacagagagctgacgtacagtaactttcacccattattggttagtgggaggctgagaataccagaaaatttttttgaggaagagtctcgctaccactgtgccctaatactcaacctccaaaaatcaccgtttactgggacgtggaattttacatcctgcagtgaacgccactttgtgtctctctgtcagaaatattcagaagttaaaagcagacagacgttgcagaatgcttcagaaactgtaaagtatctaaataatctgtacaaaataatcccaaagactctgacttggcacagtgctaaaagggagtgtctgaaaagtaacatgcagctggtgagcatcacggacccttaccagcaggcattcctcagtgtgcaggcgctccttcacaactcttccttatggatcggactcttcagtcaagatgatgaactcaactttggttggtcagatgggaaacgtcttcattttagtcgctgggctgaaactaatgggcaactcgaagactgtgtagtattagacactgatggattctggaaaacagttgattgcaatgacaatcaaccaggtgctatttgctactattcaggaaatgagactgaaaaagaggtcaaaccagttgacagtgttaaatgtccatctcctgttctaaatactccgtggataccatttcagaactgttgctacaatttcataataacaaagaataggcatatggcaacaacacaggatgaagttcatactaaatgccagaaactgaatccaaaatcacatattctgagtattcgagatgaaaaggagaataactttgttcttgagcaactgctgtacttcaattatatggcttcatgggtcatgttaggaataacttatagaaataattctcttatgtggtttgataagaccccactgtcatatacacattggagagcaggaagaccaactataaaaaatgagaagtttttggctggtttaagtactgacggcttctgggatattcaaacctttaaagttattgaagaagcagtttattttcaccagcacagcattcttgcttgtaaaattgaaatggttgactacaaagaagaacataatactacactgccacagtttatgccatatgaagatggtatttacagtgttattcaaaaaaaggtaacatggtatgaagcattaaacatgtgttctcaaagtggaggtcacttggcaagcgttcacaaccaaaatggccagctctttctggaagatattgtaaaacgtgatggatttccactatgggttgggctctcaagtcatgatggaagtgaatcaagttttgaatggtctgatggtagtacatttgactatatcccatggaaaggccaaacatctcctggaaattgtgttctcttggatccaaaaggaacttggaaacatgaaaaatgcaactctgttaaggatggtgctatttgttataaacctacaaaatctaaaaagctgtcccgtcttacatattcatcaagatgtccagcagcaaaagagaatgggtcacggtggatccagtacaagggtcactgttacaagtctgatcaggcattgcacagtttttcagaggccaaaaaattgtgttcaaaacatgatcactctgcaactatcgtttccataaaagatgaagatgagaataaatttgtgagcagactgatgagggaaaataataacattaccatgagagtttggcttggattatctcaacattctgttgaccagtcttggagttggttagatggatcagaagtgacatttgtcaaatgggaaaataaaagtaagagtggtgttggaagatgtagcatgttgatagcttcaaatgaaacttggaaaaaagttgaatgtgaacatggttttggaagagttgtctgcaaagtgcctctgggccctgattacacagcaatagctatcatagttgccacactaagtatcttagttctcatgggcggactgatttggttcctcttccaaaggcaccgtttgcacctggcgggtttctcatcagttcgatatgcacaaggagtgaatgaagatgagattatgcttccttctttccatgactaaattcttctaaaagttttctaatttgcactaatgtggttatggagaaattagtcacttaaaatgtcccagtgtcagtatttactctgctccaaagtagaactcttaaatactttttcagttgtttagatcttaggcatgtgctggtatccacagttaattccctgctaaatgccatgtttatcaccctaattaatagaatggaggggactccaaagctggaactgaagtccaaattgtttgtacagtaatatgtttaatgttcattttctctgtatgaatgtgattggtaactaggatatgtatattttaatagaatttttaacaaaacttcttagaaaattaaaataggcatattactaggtgacatgtctactttttaatttttaagagcatccggccaaatgcaaaattagtacctcaaagtaaaaattgaactgtaaactctatcagcattgtttcaaaatagtcatttttagcactggggaaaaataaacaataagacatgcttactttttaatttttatttttttgagactgagtctctctctgttgcccaggctggagtacaatggcgtgatctcggctcactgcaaatctccgcctcccaggttcaagcgattctcctgcctcagcctcctgagtagctgggattacaggcaactgccaccatgcccggctaatttttgtatttttagtagagatggggtttcaccatgttggccaggctggtctcgaactcgtgaccgcagtgatcctcccgcctcggcctcccaaagtgctgggattacaggcatgagccaccgcgcctggcctctgcttactttttatatagcaaaatgattccccttggcaagatgtttcttatattattccaaagttatttcataccattattatgtaaatatgaagagtttttttctgtttataattgtttataaaacaatgacttttaaagatttagtgcttaacattttcccaagtgtgggaacattatttttagattgagtaggtaccttgtagcagtgtgctttgcattttctgatgtattacatgactgtttcttttgtaaagagaatcaactaggtatttaagactgataattttacaatttatatgcttcacatagcatgtcaacttttgactaagaattttgttttacttttttaacatgtgttaaacagagaaagggtccatgaaggaaagtgtatgagttgcatttgtaaaaatgagactttttcagtggaactctaaaccttgtgatgactactaacaaatgtaaaattatgagtgattaagaaaacattgctttgtggttatcactttaagttttgacacctagattatagtcttagtaatagcatccactggaaaaggtgaaaatgttttattcagcatttaacttacatttgtactttagagtatttttgtataaaatccatagatttattttacatttagagtatttacactatgataaagttgtaaataattttctaagacagtttttatatagtctacagttgtcctgatttcttattgaatttgttagactagttctcttgtcttgtgatctgtgtacaattttagtcactaagactttcctccaagaactaagccaacttgatgtgaaaagcacggctgtatataatggtgatgtcataataaagttgttttatcttttaagtaaaaaaaaaaaaaaaaaaaaa

SEQ ID NO: 145 - protein, 1722 aa, Homo sapiens
MRTGWATPRRPAGLLMLLFWFFDLAEPSGRAANDPFTIVHGNTGKCIKPVYGWIVADDCDETEDKLWKWVSQHRLFHLHSQKCLGLDITKSVNELRMFSCDSSAMLWWKCEHHSLYGAARYRLALKDGHGTAISNASDVWKKGGSEESLCDQPYHEIYTRDGNSYGRPCEFPFLIDGTWHHDCILDEDHSGPWCATTLNYEYDRKWGICLKPENGCEDNWEKNEQFGSCYQFNTQTALSWKEAYVSCQNQGADLLSINSAAELTYLKEKEGIAKIFWIGLNQLYSARGWEWSDHKPLNFLNWDPDRPSAPTIGGSSCARMDAESGLWQSFSCEAQLPYVCRKPLNNTVELTDVWTYSDTRCDAGWLPNNGFCYLLVNESNSWDKAHAKCKAFSSDLISIHSLADVEVVVTKLHNEDIKEEVWIGLKNINIPTLFQWSDGTEVTLTYWDENEPNVPYNKTPNCVSYLGELGQWKVQSCEEKLKYVCKRKGEKLNDASSDKMCPPDEGWKRHGETCYKIYEDEVPFGTNCNLTITSRFEQEYLNDLMKKYDKSLRKYFWTGLRDVDSCGEYNWATVGGRRRAVTFSNWNFLEPASPGGCVAMSTGKSVGKWEVKDCRSFKALSICKKMSGPLGPEEASPKPDDPCPEGWQSFPASLSCYKVFHAERIVRKRNWEEAERFCQALGAHLSSFSHVDEIKEFLHFLTDQFSGQHWLWIGLNKRSPDLQGSWQWSDRTPVSTIIMPNEFQQDYDIRDCAAVKVFHRPWRRGWHFYDDREFIYLRPFACDTKLEWVCQIPKGRTPKTPDWYNPDRAGIHGPPLIIEGSEYWFVADLHLNYEEAVLYCASNHSFLATITSFVGLKAIKNKIANISGDGQKWWIRISEWPIDDHFTYSRYPWHRFPVTFGEECLYMSAKTWLIDLGKPTDCSTKLPFICEKYNVSSLEKYSPDSAAKVQCSEQWIPFQNKCFLKIKPVSLTFSQASDTCHSYGGTLPSVLSQIEQDFITSLLPDMEATLWIGLRWTAYEKINKWTDNRELTYSNFHPLLVSGRLRIPENFFEEESRYHCALILNLQKSPFTGTWNFTSCSERHFVSLCQKYSEVKSRQTLQNASETVKYLNNLYKIIPKTLTWHSAKRECLKSNMQLVSITDPYQQAFLSVQALLHNSSLWIGLFSQDDELNFGWSDGKRLHFSRWAETNGQLEDCVVLDTDGFWKTVDCNDNQPGAICYYSGNETEKEVKPVDSVKCPSPVLNTPWIPFQNCCYNFIITKNRHMATTQDEVHTKCQKLNPKSHILSIRDEKENNFVLEQLLYFNYMASWVMLGITYRNNSLMWFDKTPLSYTHWRAGRPTIKNEKFLAGLSTDGFWDIQTFKVIEEAVYFHQHSILACKIEMVDYKEEHNTTLPQFMPYEDGIYSVIQKKVTWYEALNMCSQSGGHLASVHNQNGQLFLEDIVKRDGFPLWVGLSSHDGSESSFEWSDGSTFDYIPWKGQTSPGNCVLLDPKGTWKHEKCNSVKDGAICYKPTKSKKLSRLTYSSRCPAAKENGSRWIQYKGHCYKSDQALHSFSEAKKLCSKHDHSATIVSIKDEDENKFVSRLMRENNNITMRVWLGLSQHSVDQSWSWLDGSEVTFVKWENKSKSGVGRCSMLIASNETWKKVECEHGFGRVVCKVPLGPDYTAIAIIVATLSILVLMGGLIWFLFQRHRLHLAGFSSVRYAQGVNEDEIMLPSFHD

SEQ ID NO: 146 - protein, 15 aa, Artificial sequence
  Exemplary linker
GGGGSGGGGSGGGGS

SEQ ID NO: 147 - DNA, 1518 bp, Artificial Sequence
  Mouse-human hybrid fusion protein
aagcttgccgccatggattttcaagtgcagattttcagcttcctgctaatcagtgcttcagtcataattgccagaggacaaattgttctctcccagtctccagcaatcctgtctgcatctccaggggagaaggtcacaatgacttgcagggccagctcaagtgtaagttacatgcactggtaccagcagaagccaggatcctcccccaaaccctggatttatgccccatccaacctggcttctggagtccctgctcgcttcagtggcagtgggtctgggacctcttactctctcacaatcagcagagtggaggctgaagatgctgccacttattactgccagcagtggagttttaacccacccacgttcggtgctgggaccaagctggagctgaaaggtggcggtggctcgggcggtggtggatctggaggaggtgggagctctcaggcttatctacagcagtctggggctgagctggtgaggcctggggcctcagtgaagatgtcctgcaaggcttctggctacacatttaccagttacaatatgcactgggtaaagcagacacctagacagggcctggaatggattggagctatttatccaggaaatggtgatacttcctacaatcagaagttcaagggcaaggccacactgactgtagacaaatcctccagcacagcctacatgcagctcagcagcctgacatctgaagactctgcggtctatttctgtgcaagagtggtgtactatagtaactcttactggtacttcgatgtctggggcacagggaccacggtcaccgtctctgatcaggagcccaaatcttgtgacaaaactcacacatgcccaccgtgcccagcacctgaactcctggggggaccgtcagtcttcctcttccccccaaaacccaaggacaccctcatgatctcccggacccctgaggtcacatgcgtggtggtggacgtgagccacgaagaccctgaggtcaagttcaactggtacgtggacggcgtggaggtgcataatgccaagacaaagccgcgggaggagcagtacaacagcacgtaccgtgtggtcagcgtcctcaccgtcctgcaccaggactggctgaatggcaaggagtacaagtgcaaggtctccaacaaagccctcccagcccccatcgagaaaacaatctccaaagccaaagggcagccccgagaaccacaggtgtacaccctgcccccatcccgggatgagctgaccaagaaccaggtcagcctgacctgcctggtcaaaggcttctatcccagcgacatcgccgtggagtgggagagcaatgggcagccggagaacaactacaagaccacgcctcccgtgctggactccgacggctccttcttcctctacagcaagctcaccgtggacaagagcaggtggcagcaggggaacgtcttctcatgctccgtgatgcatgaggctctgcacaaccactacacgcagaagagcctctccctgtctccgggtaaatgatctaga

SEQ ID NO: 148 - protein, 499 aa, Artificial sequence
  Mouse-human hybrid fusion protein
MDFQVQIFSFLLISASVIIARGQIVLSQSPAILSASPGEKVTMTCRASSSVSYMHWYQQKPGSSPKPWIYAPSNLASGVPARFSGSGSGTSYSLTISRVEAEDAATYYCQQWSFNPPTFGAGTKLELKGGGGSGGGGSGGGGSSQAYLQQSGAELVRPGASVKMSCKASGYTFTSYNMHWVKQTPRQGLEWIGAIYPGNGDTSYNQKFKGKATLTVDKSSSTAYMQLSSLTSEDSAVYFCARVVYYSNSYWYFDVWGTGTTVTVSDQEPKSCDKTHTCPPCPAPELLGGPSVFLFPPKPKDTLMISRTPEVTCVVVDVSHEDPEVKFNWYVDGVEVHNAKTKPREEQYNSTYRVVSVLTVLHQDWLNGKEYKCKVSNKALPAPIEKTISKAKGQPREPQVYTLPPSRDELTKNQVSLTCLVKGFYPSDIAVEWESNGQPENNYKTTPPVLDSDGSFFLYSKLTVDKSRWQQGNVFSCSVMHEALHNHYTQKSLSLSPGK

SEQ ID NO: 149 - DNA, 1470 bp, Artificial sequence
  2H7scFv-CD154 L2
aagcttgccgccatggattttcaagtgcagattttcagcttcctgctaatcagtgcttcagtcataattgccagaggacaaattgttctctcccagtctccagcaatcctgtctgcatctccaggggagaaggtcacaatgacttgcagggccagctcaagtgtaagttacatgcactggtaccagcagaagccaggatcctcccccaaaccctggatttatgccccatccaacctggcttctggagtccctgctcgcttcagtggcagtgggtctgggacctcttactctctcacaatcagcagagtggaggctgaagatgctgccacttattactgccagcagtggagttttaacccacccacgttcggtgctgggaccaagctggagctgaaaggtggcggtggctcgggcggtggtggatctggaggaggtgggagctctcaggcttatctacagcagtctggggctgagctggtgaggcctggggcctcagtgaagatgtcctgcaaggcttctggctacacatttaccagttacaatatgcactgggtaaagcagacacctagacagggcctggaatggattggagctatttatccaggaaatggtgatacttcctacaatcagaagttcaagggcaaggccacactgactgtagacaaatcctccagcacagcctacatgcagctcagcagcctgacatctgaagactctgcggtctatttctgtgcaagagtggtgtactatagtaactcttactggtacttcgatgtctggggcacagggaccacggtcaccgtctctgatccaagaaggttggacaagatagaagatgaaaggaatcttcatgaagattttgtattcatgaaaacgatacagagatgcaacacaggagaaagatccttatccttactgaactgtgaggagattaaaagccagtttgaaggctttgtgaaggatataatgttaaacaaagaggagacgaagaaagaaaacagctttgaaatgcaaaaaggtgatcagaatcctcaaattgcggcacatgtcataagtgaggccagcagtaaaacaacatctgtgttacagtgggctgaaaaaggatactacaccatgagcaacaacttggtaaccctggaaaatgggaaacagctgaccgttaaaagacaaggactctattatatctatgcccaagtcaccttctgttccaatcgggaagcttcgagtcaagctccatttatagccagcctctgcctaaagtcccccggtagattcgagagaatcttactcagagctgcaaatacccacagttccgccaaaccttgcgggcaacaatccattcacttgggaggagtatttgaattgcaaccaggtgcttcggtgtttgtcaatgtgactgatccaagccaagtgagccatggcactggcttcacgtcctttggcttactcaaactcgagtgataatctaga

SEQ ID NO: 150 - protein, 482 aa, Artificial sequence
  2H7scFv-CD154 L2
MDFQVQIFSFLLISASVIIARGQIVLSQSPAILSASPGEKVTMTCRASSSVSYMHWYQQKPGSSPKPWIYAPSNLASGVPARFSGSGSGTSYSLTISRVEAEDAATYYCQQWSFNPPTFGAGTKLELKGGGGSGGGGSGGGGSSQAYLQQSGAELVRPGASVKMSCKASGYTFTSYNMHWVKQTPRQGLEWIGAIYPGNGDTSYNQKFKGKATLTVDKSSSTAYMQLSSLTSEDSAVYFCARVVYYSNSYWYFDVWGTGTTVTVSDPRRLDKIEDERNLHEDFVFMKTIQRCNTGERSLSLLNCEEIKSQFEGFVKDIMLNKEETKKENSFEMQKGDQNPQIAAHVISEASSKTTSVLQWAEKGYYTMSNNLVTLENGKQLTVKRQGLYYIYAQVTFCSNREASSQAPFIASLCLKSPGRFERILLRAANTHSSAKPCGQQSIHLGGVFELQPGASVFVNVTDPSQVSHGTGFTSFGLLKLE

SEQ ID NO: 151 - DNA, 1290 bp, Artificial sequence
  2H7scFv-CD154 S4
aagcttgccgccatggattttcaagtgcagattttcagcttcctgctaatcagtgcttcagtcataattgccagaggacaaattgttctctcccagtctccagcaatcctgtctgcatctccaggggagaaggtcacaatgacttgcagggccagctcaagtgtaagttacatgcactggtaccagcagaagccaggatcctcccccaaaccctggatttatgccccatccaacctggcttctggagtccctgctcgcttcagtggcagtgggtctgggacctcttactctctcacaatcagcagagtggaggctgaagatgctgccacttattactgccagcagtggagttttaacccacccacgttcggtgctgggaccaagctggagctgaaaggtggcggtggctcgggcggtggtggatctggaggaggtgggagctctcaggcttatctacagcagtctggggctgagctggtgaggcctggggcctcagtgaagatgtcctgcaaggcttctggctacacatttaccagttacaatatgcactgggtaaagcagacacctagacagggcctggaatggattggagctatttatccaggaaatggtgatacttcctacaatcagaagttcaagggcaaggccacactgactgtagacaaatcctccagcacagcctacatgcagctcagcagcctgacatctgaagactctgcggtctatttctgtgcaagagtggtgtactatagtaactcttactggtacttcgatgtctggggcacagggaccacggtcaccgtctctgatccagaaaacagctttgaaatgcaaaaaggtgatcagaatcctcaaattgcggcacatgtcataagtgaggccagcagtaaaacaacatctgtgttacagtgggctgaaaaaggatactacaccatgagcaacaacttggtaaccctggaaaatgggaaacagctgaccgttaaaagacaaggactctattatatctatgcccaagtcaccttctgttccaatcgggaagcttcgagtcaagctccatttatagccagcctctgcctaaagtcccccggtagattcgagagaatcttactcagagctgcaaatacccacagttccgccaaaccttgcgggcaacaatccattcacttgggaggagtatttgaattgcaaccaggtgcttcggtgtttgtcaatgtgactgatccaagccaagtgagccatggcactggcttcacgtcctttggcttactcaaactcgagtgataatctaga

SEQ ID NO: 152 - protein, 422 aa, Artificial sequence
  2H7scFv-CD154 S4
MDFQVQIFSFLLISASVIIARGQIVLSQSPAILSASPGEKVTMTCRASSSVSYMHWYQQKPGSSPKPWIYAPSNLASGVPARFSGSGSGTSYSLTISRVEAEDAATYYCQQWSFNPPTFGAGTKLELKGGGGSGGGGSGGGGSSQAYLQQSGAELVRPGASVKMSCKASGYTFTSYNMHWVKQTPRQGLEWIGAIYPGNGDTSYNQKFKGKATLTVDKSSSTAYMQLSSLTSEDSAVYFCARVVYYSNSYWYFDVWGTGTTVTVSDPENSFEMQKGDQNPQIAAHVISEASSKTTSVLQWAEKGYYTMSNNLVTLENGKQLTVKRQGLYYIYAQVTFCSNREASSQAPFIASLCLKSPGRFERILLRAANTHSSAKPCGQQSIHLGGVFELQPGASVFVNVTDPSQVSHGTGFTSFGLLKLE

SEQ ID NO: 153 - DNA, 3630 bp, Homo sapiens
atacgggagaactaaggctgaaacctcggaggaacaaccacttttgaagtgacttcgcggcgtgcgttgggtgcggactaggtggccccggcgggagtgtgctggagcctgaagtccacgcgcgcggctgagaaccgccgggaccgcacgtgggcgccgcgcgcttcccccgcttcccaggtgggcgccggccgccaggccacctcacgtccggccccggggatgcgcgtcctcctcgccgcgctgggactgctgttcctgggggcgctacgagccttcccacaggatcgacccttcgaggacacctgtcatggaaaccccagccactactatgacaaggctgtcaggaggtgctgttaccgctgccccatggggctgttcccgacacagcagtgcccacagaggcctactgactgcaggaagcagtgtgagcctgactactacctggatgaggccgaccgctgtacagcctgcgtgacttgttctcgagatgacctcgtggagaagacgccgtgtgcatggaactcctcccgtgtctgcgaatgtcgacccggcatgttctgttccacgtctgccgtcaactcctgtgcccgctgcttcttccattctgtctgtccggcagggatgattgtcaagttcccaggcacggcgcagaagaacacggtctgtgagccggcttccccaggggtcagccctgcctgtgccagcccagagaactgcaaggaaccctccagtggcaccatcccccaggccaagcccaccccggtgtccccagcaacctccagtgccagcaccatgcctgtaagagggggcacccgcctcgcccaggaagctgcttctaaactgacgagggctcccgactctccctcctctgtgggaaggcctagttcagatccaggtctgtccccaacacagccatgcccagaggggtctggtgattgcagaaagcagtgtgagcccgactactacctggacgaggccggccgctgcacagcctgcgtgagctgttctcgagatgaccttgtggagaagacgccatgtgcatggaactcctcccgcacctgcgaatgtcgacctggcatgatctgtgccacatcagccaccaactcctgtgcccgctgtgtcccctacccaatctgtgcagcagagacggtcaccaagccccaggatatggctgagaaggacaccacctttgaggcgccacccctggggacccagccggactgcaaccccaccccagagaatggcgaggcgcctgccagcaccagccccactcagagcttgctggtggactcccaggccagtaagacgctgcccatcccaaccagcgctcccgtcgctctctcctccacggggaagcccgttctggatgcagggccagtgctcttctgggtgatcctggtgttggttgtggtggtcggctccagcgccttcctcctgtgccaccggagggcctgcaggaagcgaattcggcagaagctccacctgtgctacccggtccagacctcccagcccaagctagagcttgtggattccagacccaggaggagctcaacgcagctgaggagtggtgcgtcggtgacagaacccgtcgcggaagagcgagggttaatgagccagccactgatggagacctgccacagcgtgggggcagcctacctggagagcctgccgctgcaggatgccagcccggccgggggcccctcgtcccccagggaccttcctgagccccgggtgtccacggagcacaccaataacaagattgagaaaatctacatcatgaaggctgacaccgtgatcgtggggaccgtgaaggctgagctgccggagggccggggcctggcggggccagcagagcccgagttggaggaggagctggaggcggaccataccccccactaccccgagcaggagacagaaccgcctctgggcagctgcagcgatgtcatgctctcagtggaagaggaagggaaagaagaccccttgcccacagctgcctctggaaagtgaggcctgggctgggctggggctaggagggcagcagggtggcctctgggaggccaggatggcactgttggcaccgaggttgggggcagaggcccatctggcctgaactgaggctccagcatctagtggtggaccggccggtcactgcaggggtctggtggtctctgcttgcatccccaacttagctgtcccctgacccagagcctaggggatccggggcttgtacagaagagacagtccaaggggactggatcccagcagtgatgttggttgaggcagcaaacagatggcaggatgggcactgccgagaacagcattggtcccagagccctgggcatcagaccttaaccaccaggcccacagcccagcgagggagaggtcgtgaggccagctcccggggcccctgtaaccctactctcctctctccctggacctcagaggtgacacccattgggcccttccggcatgcccccagttactgtaaatgtggcccccagtgggcatggagccagtgcctgtggttgtttctccagagtcaaaagggaagtcgagggatggggcgtcgtcagctggcactgtctctgctgcagcggccacactgtactctgcactggtgtgagggcccctgcctggactgtgggaccctcctggtgctgcccaccttccctgtcctgtagccccctcggtgggcccagggcctaggggcccaggatcaagtcactcatctcagaatgtccccaccaatccccgccacagcaggcgcctcgggtcccagatgtctgcagccctcagcagctgcagaccgcccctcaccaacccagagaacctgctttactttgcccagggacttcctccccatgtgaacatggggaacttcgggccctgcctggagtccttgaccgctctctgtgggccccacccactctgtcctgggaaatgaagaagcatcttccttaggtctgccctgcttgcaaatccactagcaccgaccccaccacctggttccggctctgcacgctttggggtgtggatgtcgagaggcaccacggcctcacccaggcatctgctttactctggaccataggaaacaagaccgtttggaggtttcatcaggattttgggtttttcacatttcacgctaaggagtagtggccctgacttccggtcggctggccagctgactccctagggccttcagacgtgtatgcaaatgagtgatggataaggatgagtcttggagttgcgggcagcctggagactcgtggacttaccgcctggaggcaggcccgggaaggctgctgtttactcatcgggcagccacgtgctctctggaggaagtgatagtttctgaaaccgctcagatgttttggggaaagttggagaagccgtggccttgcgagaggtggttacaccagaacctggacattggccagaagaagcttaagtgggcagacactgtttgcccagtgtttgtgcaaggatggagtgggtgtctctgcatcacccacagccgcagctgtaaggcacgctggaaggcacacgcctgccaggcagggcagtctggcgcccatgatgggagggattgacatgtttcaacaaaataatgcacttccttaaaaaaaa

SEQ ID NO: 154 - protein, 595 aa, Homo sapiens
MRVLLAALGLLFLGALRAFPQDRPFEDTCHGNPSHYYDKAVRRCCYRCPMGLFPTQQCPQRPTDCRKQCEPDYYLDEADRCTACVTCSRDDLVEKTPCAWNSSRVCECRPGMFCSTSAVNSCARCFFHSVCPAGMIVKFPGTAQKNTVCEPASPGVSPACASPENCKEPSSGTIPQAKPTPVSPATSSASTMPVRGGTRLAQEAASKLTRAPDSPSSVGRPSSDPGLSPTQPCPEGSGDCRKQCEPDYYLDEAGRCTACVSCSRDDLVEKTPCAWNSSRTCECRPGMICATSATNSCARCVPYPICAAETVTKPQDMAEKDTTFEAPPLGTQPDCNPTPENGEAPASTSPTQSLLVDSQASKTLPIPTSAPVALSSTGKPVLDAGPVLFWVILVLVVVVGSSAFLLCHRRACRKRIRQKLHLCYPVQTSQPKLELVDSRPRRSSTQLRSGASVTEPVAEERGLMSQPLMETCHSVGAAYLESLPLQDASPAGGPSSPRDLPEPRVSTEHTNNKIEKIYIMKADTVIVGTVKAELPEGRGLAGPAEPELEEELEADHTPHYPEQETEPPLGSCSDVMLSVEEEGKEDPLPTAASGK

SEQ ID NO: 155 - DNA, 1824 bp, Homo sapiens
cagctctctgtcagaatggccaccatggtaccatccgtgttgtggcccagggcctgctggactctgctggtctgctgtctgctgaccccaggtgtccaggggcaggagttccttttgcgggtggagccccagaaccctgtgctctctgctggagggtccctgtttgtgaactgcagtactgattgtcccagctctgagaaaatcgccttggagacgtccctatcaaaggagctggtggccagtggcatgggctgggcagccttcaatctcagcaacgtgactggcaacagtcggatcctctgctcagtgtactgcaatggctcccagataacaggctcctctaacatcaccgtgtacgggctcccggagcgtgtggagctggcacccctgcctccttggcagccggtgggccagaacttcaccctgcgctgccaagtggagggtgggtcgccccggaccagcctcacggtggtgctgcttcgctgggaggaggagctgagccggcagcccgcagtggaggagccagcggaggtcactgccactgtgctggccagcagagacgaccacggagcccctttctcatgccgcacagaactggacatgcagccccaggggctgggactgttcgtgaacacctcagccccccgccagctccgaacctttgtcctgcccgtgacccccccgcgcctcgtggccccccggttcttggaggtggaaacgtcgtggccggtggactgcaccctagacgggctttttccagcctcagaggcccaggtctacctggcgctgggggaccagatgctgaatgcgacagtcatgaaccacggggacacgctaacggccacagccacagccacggcgcgcgcggatcaggagggtgcccgggagatcgtctgcaacgtgaccctagggggcgagagacgggaggcccgggagaacttgacggtctttagcttcctaggacccattgtgaacctcagcgagcccaccgcccatgaggggtccacagtgaccgtgagttgcatggctggggctcgagtccaggtcacgctggacggagttccggccgcggccccggggcagccagctcaacttcagctaaatgctaccgagagtgacgacggacgcagcttcttctgcagtgccactctcgaggtggacggcgagttcttgcacaggaacagtagcgtccagctgcgagtcctgtatggtcccaaaattgaccgagccacatgcccccagcacttgaaatggaaagataaaacgagacacgtcctgcagtgccaagccaggggcaacccgtaccccgagctgcggtgtttgaaggaaggctccagccgggaggtgccggtggggatcccgttcttcgtcaacgtaacacataatggtacttatcagtgccaagcgtccagctcacgaggcaaatacaccctggtcgtggtgatggacattgaggctgggagctcccactttgtccccgtcttcgtggcggtgttactgaccctgggcgtggtgactatcgtactggccttaatgtacgtcttcagggagcaccaacggagcggcagttaccatgttagggaggagagcacctatctgcccctcacgtctatgcagccgacagaagcaatgggggaagaaccgtccagagctgagtgacgctgggatccgggatcaaagttggcgggggcttggctgtgccctcagattccgcaccaataaagccttcaaactccctaaaaaaaaaaaaaaaaaaaaaaaaaaaaaaaaaaaaaaaaaaaaaaaaaaaaaaaaaaaaaaaaaaaaaaaaaaaaaaaaaaaaaa

SEQ ID NO: 156 - protein, 547 aa, Homo sapiens
MATMVPSVLWPRACWTLLVCCLLTPGVQGQEFLLRVEPQNPVLSAGGSLFVNCSTDCPSSEKIALETSLSKELVASGMGWAAFNLSNVTGNSRILCSVYCNGSQITGSSNITVYGLPERVELAPLPPWQPVGQNFTLRCQVEGGSPRTSLTVVLLRWEEELSRQPAVEEPAEVTATVLASRDDHGAPFSCRTELDMQPQGLGLFVNTSAPRQLRTFVLPVTPPRLVAPRFLEVETSWPVDCTLDGLFPASEAQVYLALGDQMLNATVMNHGDTLTATATATARADQEGAREIVCNVTLGGERREARENLTVFSFLGPIVNLSEPTAHEGSTVTVSCMAGARVQVTLDGVPAAAPGQPAQLQLNATESDDGRSFFCSATLEVDGEFLHRNSSVQLRVLYGPKIDRATCPQHLKWKDKTRHVLQCQARGNPYPELRCLKEGSSREVPVGIPFFVNVTHNGTYQCQASSSRGKYTLVVVMDIEAGSSHFVPVFVAVLLTLGVVTIVLALMYVFREHQRSGSYHVREESTYLPLTSMQPTEAMGEEPSRAE

SEQ ID NO: 157 - DNA, 5150 bp, Homo sapiens
gagggtgaccaacttagggaccctcagtccgagggcgggtggcctctccctccactccctccctctccagggccagcgggctccacggctgggaatttccccacgggtgggccgaggacaggcagctgtttcctgtgctcctgggaggaggggatttccagccccttccctgctgctctgttcctagaggcccctctccacttgcaacttcaaaaatgaacttttggataatcacaggctggtcacagttatttgaaaggtgcagaaagggcccagggagcccccagccccgcacctgctccccagctctccgggcagttcgcatcctctgggcaaacctggaacctgagaactgtttggatagaaggtggaaacctgcctgcgtgcccgtgtgcgccaggccatccaggacccaccctcaccacctcctcagaggcctgtctccaaacactgccacatgggggttagggcttccacgcaggaatttaaggggcacagttcagccatagacacctgccgtgctcaggcacactcagcgtgggctgtggtcacgggtgtctttttttttttttttgagatgagtctcgccctgtcgcccaggctggagtgcagtggcgccacctctgctttgcaacttctgtctcctgggttcgagtgattctgctacctcagcctcctgactagctgggattaccggcgcccgccaccacgcccgaataatttttgtagttttagtagagacggaatttcgccatgttagccagactggtcttgaactcctgacctcaggtgatccacccgccttggcctcccaaagtgctgggattacaggcgggagccaccgtgcctggccatgggtgtctgtcttaccatggctgtggtcactgctgctcagagctagtcttgggcatacaagggggaccatgcttcagcagtgccacagccctgaaggtccagactgaggagttgcctctcctgactcagtgctgcctcagtttacccacgtgctccatggacctttttgctgagggtcgaaccgcaggccaggccctactgtgccctggggtctgaacacggtggtcttgggcagaagaggtcagaaggcagaataagccaatgctgggggtgcccagaccccgcctttgtgcccagcccacagccagggtccccggcctgccaccttcctcctcccgcctccgctgccctcctcccctctcccctcccctcctccacagtccttatagccacaccccgcaaggaaaacccagactctggcgacagcagagacgaggatgtgcgtgggggctcggcggctgggccgcgggccgtgtgcggctctgctcctcctgggcctggggctgagcaccgtgacggggctccactgtgtcggggacacctaccccagcaacgaccggtgctgccacgagtgcaggccaggtgaggcctcaggaggggtcgccacgcacgggcactccagggactgggggctggggcagggatgggccagccaggaggctggtcctggggagggggcgggtgaggggccggccaagcctggcagaggagccgcctgggggggtccacgggcgcaagcctggggcctgaccgctgcctgacgccggcctctgctgcaggcaacgggatggtgagccgctgcagccgctcccagaacacggtgtgccgtccgtgcgggccgggcttctacaacgacgtggtcagctccaagccgtgcaagccctgcacgtggtgtaacctcagtgagctcccacctggccccacagccccacccagcacagggggcggcagcctggcacccacattcccacacagcaacatggggctcccacagccgcagaaacaaacctcaaaccacagcggggtctgctccgccacaggggtccttcgaggaaactgaggcgtctcccaggggcaccccctctccctccgggggcccaaactcggcccaggccacgtggagtcggggagaccacgctggccatgtggcctggccttgctggcctgagcagtgaggctggggggttgggccatggagaccctgccgcaggcggggctggcggctggaggcggtggaggggtagggaagggtggctggggctgccacggaaccagccccaggttgtggccaggaagggagggcccaggagcctcgggggctgcaggggctccaagtatcaggggaggccgcagacccctgcccacggccgtttgtgtggtggggaggccaacctgtcctccagtgcccacgcttcctgaggaccctgtccacagcccccacctgaccacccccccatccggcccctgctcaggaagtgggagtgagcggaagcagctgtgcacggccacacaggacacagtctgccgctgccgggcgggcacccagcccctggacagctacaagcctggagttggtgagctcggtggctgcggccggcggttgggggtgtgcatagcggctgtctgtgacgcagatgggccgtgggccgcagggacctggccccaccggtgcctcctctggcatcctcaagaccgagctcccgggtcagggcccacgggtgggatgtgggcagggagggcttccagaggccaaacccaccacccagccatggggggcaagtgcctgccccacaggctctgccccatgtccccagcacccggggcctgtgggcagcccctgaccaccctatctttgttgcagactgtgccccctgccctccagggcacttctccccaggcgacaaccaggcctgcaagccctggaccaagtgaggggcctggccaggggctgggaggggctgggggggggttggggtggttaggagggcggaggagctggggagctgggagggcctgggggggcaggtggggtgggggccagttttgggggaaggggaggtgctggtgcccctgggggcctggctatgtgcctggacctggttggggagcaggaagctgctgcctgggggcagcctttccctgtgggtggagctgggtgtgtgggaccctcaccctccgcagctgggaggccctgggggcacaggacagggaggtgctggtggggggtgtagatgtgggagaagggtgtgtggccttggaggcccctgtggggggcacgtggggctgggcagcgtccttggctgtcactggcctggtgtctgtggtagatgctgcctgtggctggccagcgtggaccctgttatccccaccgcatctcccgggtcccagggggtttctggcctgagcaacacctcctgttccccaacagctgcaccttggctgggaagcacaccctgcagccggccagcaatagctcggacgcaatctgtgaggacagggaccccccagccacgcagccccaggaaacccagggccccccggccaggcccatcactgtccagcccactgaagcctggcccagaacctcacagggaccctccacccggcccgtggaggtccccgggggtaagggagcctggcccagcccagtggggtccccatcctgaataggagaaggggagggcggaatgggggcccctcctgtggaccccacccagcagaccccttcctgcaggccgtgcggttgccgccatcctgggcctgggcctggtgctggggctgctgggccccctggccatcctgctggccctgtacctgctccggagggaccagaggctgccccccgatgcccacaagccccctggtgagtgcctcatggccctgccgcactgctcctggcgggtgaggcccacccaccaatctctccttttttcctccccagggggaggcagtttccggacccccatccaagaggagcaggccgacgcccactccaccctggccaagatctgacctgggcccaccaaggtggacgctgggccccgccaggctggagcccggagggtctgctgggcgagcagggcaggtgcaggccgcctgccccgccacgctcctgggccaactctgcaccgttctaggtgccgatggctgcctccggctctctgcttacgtatgccatgcatacctcctgccccgcgggaccacaataaaaaccttggcagacgggagtctccgaccggcactgtgggctgcacacctgtggcatggaggcttggcccgtgcccgcctctgactggagaggggtcttgggaggcttgggccgtgcccgcctctggctggacaggggtcttgggaggcttgggccgtgcccgcctctggctggagaggggtcttgggagacttgggccgtgccaacctgtggctggaaaggggtcttgggagacttgggccgtgccaacctgtggctggagaggggtcttgggagacttgggctgtgccaacctgtggctggagaggggtcttggcccagggtggaggtgagggtagcggggtcaagtgggaccctggaggttggtccctgggtgcgagttccagattgagtggggagcggggggagagactgggaaagctcaggcccaaggctgcctggggtggaggttcctggccaggcgctgacaagggcagctggcccctgagccccgggttgcccaaggagcttgggagtggctgacccccggggctctgtgtccttggaggaggagtgtagagacctgcccctcttcccctccacacctacgcccaccccttgctgcacctggaagggggtcccagggcccctgagcaccccgaggagtccctgcaaagggcccacacggcccctatgtccctgccataggtgtccagggggacagtcaccttggaaaccacagtttctgcttgagccaactttctgtccaccctgggccccggccgtcccactcctgcgcacttaagagtcctgggatctgaatgagaatgaccacagcgacttcatgtaacgtggccccacagtggagaaacccaggcatccgccagcagcgtggatgcgcgagtgctggcgtgttcagatgagctcccagctcctcggcccacaccacaggtgtccacagacgctcccaaggccctggggccgtccccggccgtgcgggaatcttctcaagctggtgtctgggagtggggtatccttcgagcagcacagagcctgctcccgagcgccagtcacacccgagaccacagctcgggaacaagacgggagc

SEQ ID NO: 158 - protein, 277 aa, Homo sapiens
MCVGARRLGRGPCAALLLLGLGLSTVTGLHCVGDTYPSNDRCCHECRPGNGMVSRCSRSQNTVCRPCGPGFYNDVVSSKPCKPCTWCNLRSGSERKQLCTATQDTVCRCRAGTQPLDSYKPGVDCAPCPPGHFSPGDNQACKPWTNCTLAGKHTLQPASNSSDAICEDRDPPATQPQETQGPPARPITVQPTEAWPRTSQGPSTRPVEVPGGRAVAAILGLGLVLGLLGPLAILLALYLLRRDQRLPPDAHKPPGGGSFRTPIQEEQADAHSTLAKI

SEQ ID NO: 159 - DNA, 1419 bp, Homo sapiens
ccacgcgtccgagaccaaggagtggaaagttctccggcagccctgagatctcaagagtgacatttgtgagaccagctaatttgattaaaattctcttggaatcagctttgctagtatcatacctgtcgcagatttcatcatgggaaacagctgttacaacatagtagccactctgttgctggtcctcaactttgagaggacaagatcattgcaggatccttgtagtaactgcccagctggtacattctgtgataataacaggaatcagatttgcagtccctgtcctccaaatagtttctccagcgcaggtggacaaaggacctgtgacatatgcaggcagtgtaaaggtgttttcaggaccaggaaggagtgttcctccaccagcaatgcagagtgtgactgcactccagggtttcactgcctgggggcaggatgcagcatgtgtgaacaggattgtaaacaaggtcaagaactgacaaaaaaaggttgtaaagactgttgctttgggacatttaacgatcagaaacgtggcatctgtcgaccctggacaaactgttctttggatggaaagtctgtgcttgtgaatgggacgaaggagagggacgtggtctgtggaccatctccagccgacctctctccgggagcatcctctgtgaccccgcctgcccctgcgagagagccaggacactctccgcagatcatctccttctttcttgcgctgacgtcgactgcgttgctcttcctgctgttcttcctcacgctccgtttctctgttgttaaacggggcagaaagaaactcctgtatatattcaaacaaccatttatgagaccagtacaaactactcaagaggaagatggctgtagctgccgatttccagaagaagaagaaggaggatgtgaactgtgaaatggaagtcaatagggctgttgggactttcttgaaaagaagcaaggaaatatgagtcatccgctatcacagctttcaaaagcaagaacaccatcctacataatacccaggattcccccaacacacgttcttttctaaatgccaatgagttggcctttaaaaatgcaccactttttttttttttttggacagggtctcactctgtcacccaggctggagtgcagtggcaccaccatggctctctgcagccttgacctctgggagctcaagtgatcctcctgcctcagtctcctgagtagctggaactacaaggaagggccaccacacctgactaacttttttgttttttgttggtaaagatggcatttcgccatgttgtacaggctggtctcaaactcctaggttcactttggcctcccaaagtgctgggattacagacatgaactgccaggcccggccaaaataatgcaccacttttaacagaacagacagatgaggacagagctggtgat

SEQ ID NO: 160 - protein, 255 aa, Homo sapiens
MGNSCYNIVATLLLVLNFERTRSLQDPCSNCPAGTFCDNNRNQICSPCPPNSFSSAGGQRTCDICRQCKGVFRTRKECSSTSNAECDCTPGFHCLGAGCSMCEQDCKQGQELTKKGCKDCCFGTFNDQKRGICRPWTNCSLDGKSVLVNGTKERDVVCGPSPADLSPGASSVTPPAPAREPGHSPQIISFFLALTSTALLFLLFFLTLRFSVVKRGRKKLLYIFKQPFMRPVQTTQEEDGCSCRFPEEEEGGCEL

SEQ ID NO: 161 - DNA, 5784 bp, Homo sapiens
aaaatataattattagggcaacattataaaatgtcacttttgctttgttttctttctttttatgcaggagaaatcaatggttctgccaattatgagatgtttatatttcacaacggaggtgtacaaattttatgcaaatatcctgacattgtccagcaatttaaaatgcagttgctgaaaggggggcaaatactctgcgatctcactaagacaaaaggaagtggaaacacagtgtccattaagagtctgaaattctgccattctcagttatccaacaacagtgtctctttttttctatacaacttggaccattctcatgccaactattacttctgcaacctatcaatttttgatcctcctccttttaaagtaactcttacaggaggatatttgcatatttatggtaagacattgctttcatcttccaaacttaagagtatatatatgttttgacaacttttctcactaataaaatcaattagacaaataaatatcttttgtgttggagttcacttagatgcagttgatggtaatcatttataatgaagatatacaggtgatgatttactattaatcataattagtattattcagcaatatgcaatgtaatcccatagactgctaagtcagaaatagatcatattgccttttaaacacatatgctattaaaaatcaggaaaaacattaagacaaatacttaaacttatggcttaataatgggtattatctctattcacctaagatttaaggtttggttttgcactgtgtttgtggaatgaagtatgatgattgaaaatcatagttttataacattacttttactattacctcttttataaaaatataggcagaaaagccctttctattaaccacatttgtaaatacattatatgcataatcttttaagttttagttcctggatccttgccataatactgagatgatgttagtctaataacttgcccacttactggatttcatgactataataaagaaaagcttcatttgattaaatagctcttttaaatttggtaagagaacttgtggttcagcagaatttttcattaacatacctttttttccaatccagaatcacaactttgttgccagctgaagttctggttacccataggatgtgcagcctttgttgtagtctgcattttgggatgcatacttatttgttggcttacaaaaaaggtaagcgatttctatctttccttgtatctgctttacagatgcacatcagtgattatttcctcatcaaaagtacacatggctcttgtcagagtaatttgaccaacagggagacaattccttccccccaagacatacctactaattaaactaatcacttggaacagaaatttatgtatttgttttatagcccacacattccaaagaggacttgacttgatggcttacagagagttacattattattattattgttcaaactagatgaggaaattgaggtcaagagaagactaaaggtcaggaggaaggttaaaacatcaaaatagatgactctgatttttaaaaaattattatgcatgggctgcgaatttgaatccaaggttcctgagaggcagggcagagatgaaacaattagttataagttttgcttagctggtaagttaaaaacagtcagcaagaaagccttctaaggtgtcaattgtagctgagaaggaaattgacaacttttttacatggtaggttattagactccttgcttttaaagaaaaccactgaggagctatttagaaagataaacaacaatgacaacaacaaaaatctccctgtgctgggggatattctttttggtctcttgcattacaggttctcaatcaaagaactgacaccactctgcatattacgcgagtatgctagtactcaagtatatccacagtgtggtcattggccagtgtatatctgtgggagagtggaatttggaaagagacataaagaaggaagagaatgagatagcgcccatggtctaagtctgctgggaaagaaacaataaaggcaaaaacgaggaagaaagttcagtagaaagctctttttatgtaaagcccttttcatattgtttttctacttagcctaaagccaggaacctaagtcacattatcatgtttttgtcacataccacttcaacaaagaatagaaaacagtcaaaaaacaaagagatggagaagaaaagatgaccaagcatgtttctggctttttctttcagaagtattcatccagtgtgcacgaccctaacggtgaatacatgttcatgagagcagtgaacacagccaaaaaatctagactcacaggtatgactccatttgggggtttgggaagggaagaggtttcttcacagtaagcctggaatgttaatttttttttttttaattttaaaggaaaggaaaacatctccaaggcctaattctagaattttctgtgaaaatctggatttctcacttttaactagatttatattttctgcagtatattgaaaacaaacaagcaataggtttgtaagccactattgaaactaaacacacaaacagctcataaaccaccatagtatcaaggcaattttcccattgatgtttcaaaagttgggatgattctaagtgttttttgttgaagggttcattcagtcattcaatgagcgtttattgagcatcagttaagtgtgagttactgagtgaggcactctggggaatttggacagatatatgctaattttggactgagattaggaagagagatctgtgctggtactgctagagggaagaaggagaaattgatgaagatatctggttattttgaggtaaagagtgtgcaagtttagagaacttggatggctttagaagtctcagtaacatggaaatttgaccttttctgttaagagtcagaaaactgaaagttgccaagtttgaggagcacccagaaagtttgaagcttccattgtggaaaattcatgtcttatgcccttgaggttcgaatgatgtgcgatgtgtaatgagacagaagccactgcatttttccacccctcagtggctacagattatctaaaggggacacacatagcttgcgttgtcatggaattatagcatgggatgggagctaaaaaggatccttgagttcacatttcatgttttagatgacagaaattgatgctcaaagtgttcagtgactcttttggttccctagacagttaatacctagctttgacacttgcaaagagcttatgtttcattactttgctgtttaaaaaatatatgatctctcaatctctttgcttaatgtgttctggctgtttggatccccacaagcagaacctgacataaggacttgggtgcaagtagtttatttgggaggtgatcccaggaagaaggggtgagggggcagggagagtgagacagccaacaaggagaagcaaatgaagggcgcattattatcaaggtctcagctccaggccacagaggcctgacttcattggacctctgagaagtgtacagatgcctcccagaatcattctcttgaaggatggcaaccactggctccatcctcactgatttggggttgcctgcggagggcattagctttccctcatctctgagctgtgcctctacttgggatgagcctacttgggatgagtcttcagagaaagtctggaggcagaaaagcagtgaaatgcagtggggctgttgtgctagaacagtcagcccatgcagcgctttctgccccagcagcagctgcaatcagaggtggacagtttcaaagtgatgagtttagataatgtctgttataggagtcgagagctaaacttctctggaaatggggaactggtgctgggtgttgaagcataaagatgagtttgcatggtgtgtgtgtgagtgtgtgtgtgtgtgtgtgtgcacgtgtgtgtttgtgtgtatgaaaggcaatggagaggggaaagcttcttgtagggaactggcacatggagagcatttagagaatttatgctgaatttttgttacagatgtgaccctataatatggaactctggcacccaggcatgaagcacgttggccagttttcctcaacttgaagtgcaagattctcttatttccgggaccacggagagtctgacttaactacatacatcttctgctggtgttttgttcaatctggaagaatgactgtatcagtcaatggggattttaacagactgccttggtactgccgagtcctctcaaaacaaacaccctcttgcaaccagctttggagaaagcccagctcctgtgtgctcactgggagtggaatccctgtctccacatctgctcctagcagtgcatcagccagtaaaacaaacacatttacaagaaaaatgttttaaagatgccaggggtactgaatctgcaaagcaaatgagcagccaaggaccagcatctgtccgcatttcactatcatactacctcttctttctgtagggatgagaattcctcttttaatcagtcaagggagatgcttcaaagctggagctattttatttctgagatgttgatgtgaactgtacattagtacatactcagtactctccttcaattgctgaaccccagttgaccattttaccaagactttagatgctttcttgtgccctcaattttctttttaaaaatacttctacatgactgcttgacagcccaacagccactctcaatagagagctatgtcttacattctttcctctgctgctcaatagttttatatatctatgcatacatatatacacacatatgtatataaaattcataatgaatatatttgcctatattctccctacaagaatatttttgctccagaaagacatgttcttttctcaaattcagttaaaatggtttactttgttcaagttagtggtaggaaacattgcccggaattgaaagcaaatttattttattatcctattttctaccattatctatgttttcatggtgctattaattacaagtttagttctttttgtagatcatattaaaattgcaaacaaaatcatctttaatgggccagcattctcatggggtagagcagaatattcatttagcctgaaagctgcagttactataggttgctgtcagactatacccatggtgcctctgggcttgacaggtcaaaatggtccccatcagcctggagcagccctccagacctgggtggaattccagggttgagagactcccctgagccagaggccactaggtattcttgctcccagaggctgaagtcaccctgggaatcacagtggtctacctgcattcataattccaggatctgtgaagagcacatatgtgtcagggcacaattccctctcataaaaaccacacagcctggaaattggccctggcccttcaagatagccttctttagaatatgatttggctagaaagattcttaaatatgtggaatatgattattcttagctggaatattttctctacttcctgtctgcatgcccaaggcttctgaagcagccaatgtcgatgcaacaacatttgtaactttaggtaaactgggattatgttgtagtttaacattttgtaactgtgtgcttatagtttacaagtgagacccgatatgtcattatgcatacttatattatcttaagcatgtgtaatgctggatgtgtacagtacagtactgaacttgtaatttgaatctagtatggtgttctgttttcagctgacttggacaacctgactggctttgcacaggtgttccctgagttgtttgcaggtttctgtgtgtggg

SEQ ID NO: 162 - protein, 199 aa, Homo sapiens
MKSGLWYFFLFCLRIKVLTGEINGSANYEMFIFHNGGVQILCKYPDIVQQFKMQLLKGGQILCDLTKTKGSGNTVSIKSLKFCHSQLSNNSVSFFLYNLDHSHANYYFCNLSIFDPPPFKVTLTGGYLHIYESQLCCQLKFWLPIGCAAFVVVCILGCILICWLTKKKYSSSVHDPNGEYMFMRAVNTAKKSRLTDVTL

SEQ ID NO: 163 - DNA, 822 bp, Homo sapiens
gggctgctccacgcttttgccggagacagagactgacatggaacaggggaagggcctggctgtcctcatcctggctatcattcttcttcaaggtactttggcccagtcaatcaaaggaaaccacttggttaaggtgtatgactatcaagaagatggttcggtacttctgacttgtgatgcagaagccaaaaatatcacatggtttaaagatgggaagatgatcggcttcctaactgaagataaaaaaaaatggaatctgggaagtaatgccaaggaccctcgagggatgtatcagtgtaaaggatcacagaacaagtcaaaaccactccaagtgtattacagaatgtgtcagaactgcattgaactaaatgcagccaccatatctggctttctctttgctgaaatcgtcagcattttcgtccttgctgttggggtctacttcattgctggacaggatggagttcgccagtcgagagcttcagacaagcagactctgttgcccaatgaccagctctaccagcccctcaaggatcgagaagatgaccagtacagccaccttcaaggaaaccagttgaggaggaattgaactcaggactcagagtagtccaggtgttctcctcctattcagttcccagaatcaaagcaatgcattttggaaagctcctagcagagagactttcagccctaaatctagactcaaggttcccagagatgacaaatggagaagaaaggccatcagagcaaatttgggggtttctcaaataaaataaaaataaaaacaaatactgtgtttcagaagcgccacctattggggaaaattgt

SEQ ID NO: 164 - protein, 182 aa, Homo sapiens
MEQGKGLAVLILAIILLQGTLAQSIKGNHLVKVYDYQEDGSVLLTCDAEAKNITWFKDGKMIGFLTEDKKKWNLGSNAKDPRGMYQCKGSQNKSKPLQVYYRMCQNCIELNAATISGFLFAEIVSIFVLAVGVYFIAGQDGVRQSRASDKQTLLPNDQLYQPLKDREDDQYSHLQGNQLRRN

SEQ ID NO: 165 - DNA, 1311 bp, Homo sapiens
gtaagtctgctggcctccgccatcttagtaaagtaacagtcccatgaaacaaagatgcagtcgggcactcactggagagttctgggcctctgcctcttatcagttggcgtttgggggcaagatggtaatgaagaaatgggtggtattacacagacaccatataaagtctccatctctggaaccacagtaatattgacatgccctcagtatcctggatctgaaatactatggcaacacaatgataaaaacataggcggtgatgaggatgataaaaacataggcagtgatgaggatcacctgtcactgaaggaattttcagaattggagcaaagtggttattatgtctgctaccccagaggaagcaaaccagaagatgcgaacttttatctctacctgagggcaagagtgtgtgagaactgcatggagatggatgtgatgtcggtggccacaattgtcatagtggacatctgcatcactgggggcttgctgctgctggtttactactggagcaagaatagaaaggccaaggccaagcctgtgacacgaggagcgggtgctggcggcaggcaaaggggacaaaacaaggagaggccaccacctgttcccaacccagactatgagcccatccggaaaggccagcgggacctgtattctggcctgaatcagagacgcatctgaccctctggagaacactgcctcccgctggcccaggtctcctctccagtccccctgcgactccctgtttcctgggctagtcttggaccccacgagagagaatcgttcctcagcctcatggtgaactcgcgccctccagcctgatcccccgctccctcctccctgccttctctgctggtacccagtcctaaaatattgctgcttcctcttcctttgaagcatcatcagtagtcacaccctcacagctggcctgccctcttgccaggatatttatttgtgctattcactcccttccctttggatgtaacttctccgttcagttccctccttttcttgcatgtaagttgtcccccatcccaaagtattccatctacttttctatcgccgtccccttttgcagccctctctggggatggactgggtaaatgttgacagaggccctgccccgttcacagatcctggccctgagccagccctgtgctcctccctcccccaacactccctaccaaccccctaatcccctactccctccaaccccccctcccactgtaggccactggatggtcatttggcatctccgtatatgtgctctggctcctcagctgagagagaaaaaaataaactgtatttggctgc

SEQ ID NO: 166 - protein, 207 aa, Homo sapiens
MQSGTHWRVLGLCLLSVGVWGQDGNEEMGGITQTPYKVSISGTTVILTCPQYPGSEILWQHNDKNIGGDEDDKNIGSDEDHLSLKEFSELEQSGYYVCYPRGSKPEDANFYLYLRARVCENCMEMDVMSVATIVIVDICITGGLLLLVYYWSKNRKAKAKPVTRGAGAGGRQRGQNKERPPPVPNPDYEPIRKGQRDLYSGLNQRRI

SEQ ID NO: 167 - DNA, 3 bp, Homo sapiens
  misc_feature (1)..(3): n = A, T, C or G
nnn

SEQ ID NO: 168 - protein, 2 aa, Homo sapiens
  VARIANT (1)..(2): Xaa = Any amino acid
XX

SEQ ID NO: 169 - DNA, 3084 bp, Homo sapiens
ctgggctcctggttgcagagctccaagtcctcacacagatacgcctgtttgagaagcagcgggcaagaaagacgcaagcccagaggccctgccatttctgtgggctcaggtccctactggctcaggcccctgcctccctcggcaaggccacaatgaaccggggagtcccttttaggcacttgcttctggtgctgcaactggcgctcctcccagcagccactcagggaaagaaagtggtgctgggcaaaaaaggggatacagtggaactgacctgtacagcttcccagaagaagagcatacaattccactggaaaaactccaaccagataaagattctgggaaatcagggctccttcttaactaaaggtccatccaagctgaatgatcgcgctgactcaagaagaagcctttgggaccaaggaaactttcccctgatcatcaagaatcttaagatagaagactcagatacttacatctgtgaagtggaggaccagaaggaggaggtgcaattgctagtgttcggattgactgccaactctgacacccacctgcttcaggggcagagcctgaccctgaccttggagagcccccctggtagtagcccctcagtgcaatgtaggagtccaaggggtaaaaacatacagggggggaagaccctctccgtgtctcagctggagctccaggatagtggcacctggacatgcactgtcttgcagaaccagaagaaggtggagttcaaaatagacatcgtggtgctagctttccagaaggcctccagcatagtctataagaaagagggggaacaggtggagttctccttcccactcgcctttacagttgaaaagctgacgggcagtggcgagctgtggtggcaggcggagagggcttcctcctccaagtcttggatcacctttgacctgaagaacaaggaagtgtctgtaaaacgggttacccaggaccctaagctccagatgggcaagaagctcccgctccacctcaccctgccccaggccttgcctcagtatgctggctctggaaacctcaccctggcccttgaagcgaaaacaggaaagttgcatcaggaagtgaacctggtggtgatgagagccactcagctccagaaaaatttgacctgtgaggtgtggggacccacctcccctaagctgatgctgagcttgaaactggagaacaaggaggcaaaggtctcgaagcgggagaaggcggtgtgggtgctgaaccctgaggcggggatgtggcagtgtctgctgagtgactcgggacaggtcctgctggaatccaacatcaaggttctgcccacatggtccaccccggtgcagccaatggccctgattgtgctggggggcgtcgccggcctcctgcttttcattgggctaggcatcttcttctgtgtcaggtgccggcaccgaaggcgccaagcagagcggatgtctcagatcaagagactcctcagtgagaagaagacctgccagtgccctcaccggtttcagaagacatgtagccccatttgaggcacgaggccaggcagatcccacttgcagcctccccaggtgtctgccccgcgtttcctgcctgcggaccagatgaatgtagcagatcccaggcctctggcctcctgttcgcctcctctacaatttgccattgtttctcctgggttaggccccggcttcactggttgagtgttgctctctagtttccagaggcttaatcacaccgtcctccacgccatttccttttccttcaagcctagcccttctctcattatttctctctgaccctctccccactgctcatttggatcccaggggagtgttcagggccagccctggctggcatggagggtgaggctgggtgtctggaagcatggagcatgggactgttcttttacaagacaggaccctgggaccacagagggcaggagcttgcacgaaatcacacagccaagccagtcaaggatggatgcagatccagaggtttctggcagccagtacctcctgccccatgctgcccgcttctcaccctatgtgggtggggccacagactcacatcctgaccttgcacaaacagcccctctggacacagccccatgtacacggcctcaagggatgtctcacatcctctgtctatttgagacttagaaaaatcctacaaggctggcagtgacagaactaagatgatcatctccagtttatagaccagaaccagagctcagagaggctagatgattgattaccaagtgccggactagcaagtgctggagtcgggactaacccaggtcccttgtcccaagttccactgctgcctcttgaatgcagggacaaatgccacacggctctcaccagtggctagtggtgggtactcaatgtgtacttttgggttcacagaagcacagcacccatgggaagggtccatctcagagaatttacgagcagggatgaaggcctccctgtctaaaatccctccttcatcccccgctggtggcagaatctgttaccagaggacaaagcctttggctcttctaatcagagtgcaagctgggagcacaggcactgcaggagagaatgcccagtgaccagtcactgaccctgtgcagaacctcctggaagcgagctttgctgggagagggggtagctagcctgagagggaaccctccaagggacctcaaaggtgattgtgccaggctctgcgcctgccccacaccctcccttaccctcctccagaccattcaggacacagggaaatcagggttacaaatcttcttgatccacttctctcaggatcccctctcttcctacccttcctcaccacttccctcagtcccaactccttttccctatttccttctcctcctgtctttaaagcctgcctcttccaggaagacccccctattgctgctggggctccccatttgcttactttgcatttgtgcccactctccacccctgctcccctgagctgaaataaaaatacaataaacttactataaagataaaaaaaaaaaaaaaaaaaaaaaaaaaaaaaaaaaaaaaaaaaaaaaaaaaaaaaaaaaaaaaaaaaaaaaaaaaa

SEQ ID NO: 170 - protein, 458 aa, Homo sapiens
MNRGVPFRHLLLVLQLALLPAATQGKKVVLGKKGDTVELTCTASQKKSIQFHWKNSNQIKILGNQGSFLTKGPSKLNDRADSRRSLWDQGNFPLIIKNLKIEDSDTYICEVEDQKEEVQLLVFGLTANSDTHLLQGQSLTLTLESPPGSSPSVQCRSPRGKNIQGGKTLSVSQLELQDSGTWTCTVLQNQKKVEFKIDIVVLAFQKASSIVYKKEGEQVEFSFPLAFTVEKLTGSGELWWQAERASSSKSWITFDLKNKEVSVKRVTQDPKLQMGKKLPLHLTLPQALPQYAGSGNLTLALEAKTGKLHQEVNLVVMRATQLQKNLTCEVWGPTSPKLMLSLKLENKEAKVSKREKAVWVLNPEAGMWQCLLSDSGQVLLESNIKVLPTWSTPVQPMALIVLGGVAGLLLFIGLGIFFCVRCRHRRRQAERMSQIKRLLSEKKTCQCPHRFQKTCSPI

SEQ ID NO: 171 - DNA, 2308 bp, Homo sapiens
gagagactggatggacccacaagggtgacagcccaggcggaccgatcttcccatcccacatcctccggcgcgatgccaaaaagaggctgacggcaactgggccttctgcagagaaagacctccgcttcactgccccggctggtcccaagggtcaggaagatggattcatacctgctgatgtggggactgctcacgttcatcatggtgcctggctgccaggcagagctctgtgacgatgacccgccagagatcccacacgccacattcaaagccatggcctacaaggaaggaaccatgttgaactgtgaatgcaagagaggtttccgcagaataaaaagcgggtcactctatatgctctgtacaggaaactctagccactcgtcctgggacaaccaatgtcaatgcacaagctctgccactcggaacacaacgaaacaagtgacacctcaacctgaagaacagaaagaaaggaaaaccacagaaatgcaaagtccaatgcagccagtggaccaagcgagccttccaggtcactgcagggaacctccaccatgggaaaatgaagccacagagagaatttatcatttcgtggtggggcagatggtttattatcagtgcgtccagggatacagggctctacacagaggtcctgctgagagcgtctgcaaaatgacccacgggaagacaaggtggacccagccccagctcatatgcacaggtgaaatggagaccagtcagtttccaggtgaagagaagcctcaggcaagccccgaaggccgtcctgagagtgagacttcctgcctcgtcacaacaacagattttcaaatacagacagaaatggctgcaaccatggagacgtccatatttacaacagagtaccaggtagcagtggccggctgtgttttcctgctgatcagcgtcctcctcctgagtgggctcacctggcagcggagacagaggaagagtagaagaacaatctagaaaaccaaaagaacaagaatttcttggtaagaagccgggaacagacaacagaagtcatgaagcccaagtgaaatcaaaggtgctaaatggtcgcccaggagacatccgttgtgcttgcctgcgttttggaagctctgaagtcacatcacaggacacggggcagtggcaaccttgtctctatgccagctcagtcccatcagagagcgagcgctacccacttctaaatagcaatttcgccgttgaagaggaagggcaaaaccactagaactctccatcttattttcatgtatatgtgttcattaaagcatgaatggtatggaactctctccaccctatatgtagtataaagaaaagtaggtttacattcatctcattccaacttcccagttcaggagtcccaaggaaagccccagcactaacgtaaatacacaacacacacactctaccctatacaactggacattgtctgcgtggttcctttctcagccgcttctgactgctgattctcccgttcacgttgcctaataaacatccttcaagaactctgggctgctacccagaaatcattttacccttggctcaatcctctaagctaacccccttctactgagccttcagtcttgaatttctaaaaaacagaggccatggcagaataatctttgggtaacttcaaaacggggcagccaaacccatgaggcaatgtcaggaacagaaggatgaatgaggtcccaggcagagaatcatacttagcaaagttttacctgtgcgttactaattggcctctttaagagttagtttctttgggattgctatgaatgataccctgaatttggcctgcactaatttgatgtttacaggtggacacacaaggtgcaaatcaatgcgtacgtttcctgagaagtgtctaaaaacaccaaaaagggatccgtacattcaatgtttatgcaaggaaggaaagaaagaaggaagtgaagagggagaagggatggaggtcacactggtagaacgtaaccacggaaaagagcgcatcaggcctggcacggtggctcaggcctataaccccagctccctaggagaccaaggcgggagcatctcttgaggccaggagtttgagaccagcctgggcagcatagcaagacacatccctacaaaaaattagaaattggctggatgtggtggcatacgcctgtagtcctagccactcaggaggctgaggcaggaggattgcttgagcccaggagttcgaggctgcagtcagtcatgatggcaccactgcactccagcctgggcaacagagcaagatcctgtctttaaggaaaaaaagacaagg

SEQ ID NO: 172 - protein, 272 aa, Homo sapiens
MDSYLLMWGLLTFIMVPGCQAELCDDDPPEIPHATFKAMAYKEGTMLNCECKRGFRRIKSGSLYMLCTGNSSHSSWDNQCQCTSSATRNTTKQVTPQPEEQKERKTTEMQSPMQPVDQASLPGHCREPPPWENEATERIYHFVVGQMVYYQCVQGYRALHRGPAESVCKMTHGKTRWTQPQLICTGEMETSQFPGEEKPQASPEGRPESETSCLVTTTDFQIQTEMAATMETSIFTTEYQVAVAGCVFLLISVLLLSGLTWQRRQRKSRRTI

SEQ ID NO: 173 - DNA, 1060 bp, Homo sapiens
cggctcccgcgccgcctcccctcgcgcccgagcttcgagccaagcagcgtcctggggagcgcgtcatggccttaccagtgaccgccttgctcctgccgctggccttgctgctccacgccgccaggccgagccagttccgggtgtcgccgctggatcggacctggaacctgggcgagacagtggagctgaagtgccaggtgctgctgtccaacccgacgtcgggctgctcgtggctcttccagccgcgcggcgccgccgccagtcccaccttcctcctatacctctcccaaaacaagcccaaggcggccgaggggctggacacccagcggttctcgggcaagaggttgggggacaccttcgtcctcaccctgagcgacttccgccgagagaacgagggctactatttctgctcggccctgagcaactccatcatgtacttcagccacttcgtgccggtcttcctgccagcgaagcccaccacgacgccagcgccgcgaccaccaacaccggcgcccaccatcgcgtcgcagcccctgtccctgcgcccagaggcgtgccggccagcggcggggggcgcagtgcacacgagggggctggacttcgcctgtgatatctacatctgggcgcccttggccgggacttgtggggtccttctcctgtcactggttatcaccctttactgcaaccacaggaaccgaagacgtgtttgcaaatgtccccggcctgtggtcaaatcgggagacaagcccagcctttcggcgagatacgtctaaccctgtgcaacagccactacattacttcaaactgagatccttccttttgagggagcaagtccttccctttcattttttccagtcttcctccctgtgtattcattctcatgattattattttagtgggggcggggtgggaaagattactttttctttatgtgtttgacgggaaacaaaactaggtaaaatctacagtacaccacaagggtcacaatactgttgtgcgcacatcgcggtagggcgtggaaaggggcaggccagagctacccgcagagttctcagaatca

SEQ ID NO: 174 - protein, 235 aa, Homo sapiens
MALPVTALLLPLALLLHAARPSQFRVSPLDRTWNLGETVELKCQVLLSNPTSGCSWLFQPRGAAASPTFLLYLSQNKPKAAEGLDTQRFSGKRLGDTFVLTLSDFRRENEGYYFCSALSNSIMYFSHFVPVFLPAKPTTTPAPRPPTPAPTIASQPLSLRPEACRPAAGGAVHTRGLDFACDIYIWAPLAGTCGVLLLSLVITLYCNHRNRRRVCKCPRPVVKSGDKPSLSARYV

SEQ ID NO: 175 - DNA, 4740 bp, Homo sapiens
gaattccgtggttcctcagtggtgcctgcaacccctggttcacctccttccaggttctggctccttccagccatggctctcagagtccttctgttaacagccttgaccttatgtcatgggttcaacttggacactgaaaacgcaatgaccttccaagagaacgcaaggggcttcgggcagagcgtggtccagcttcagggatccagggtggtggttggagccccccaggagatagtggctgccaaccaaaggggcagcctctaccagtgcgactacagcacaggctcatgcgagcccatccgcctgcaggtccccgtggaggccgtgaacatgtccctgggcctgtccctggcagccaccaccagcccccctcagctgctggcctgtggtcccaccgtgcaccagacttgcagtgagaacacgtatgtgaaagggctctgcttcctgtttggatccaacctacggcagcagccccagaagttcccagaggccctccgagggtgtcctcaagaggatagtgacattgccttcttgattgatggctctggtagcatcatcccacatgactttcggcggatgaaggagtttgtctcaactgtgatggagcaattaaaaaagtccaaaaccttgttctctttgatgcagtactctgaagaattccggattcactttaccttcaaagagttccagaacaaccctaacccaagatcactggtgaagccaataacgcagctgcttgggcggacacacacggccacgggcatccgcaaagtggtacgagagctgtttaacatcaccaacggagcccgaaagaatgcctttaagatcctagttgtcatcacggatggagaaaagtttggcgatcccttgggatatgaggatgtcatccctgaggcagacagagagggagtcattcgctacgtcattggggtgggagatgccttccgcagtgagaaatcccgccaagagcttaataccatcgcatccaagccgcctcgtgatcacgtgttccaggtgaataactttgaggctctgaagaccattcagaaccagcttcgggagaagatctttgcgatcgagggtactcagacaggaagtagcagctcctttgagcatgagatgtctcaggaaggcttcagcgctgccatcacctctaatggccccttgctgagcactgtggggagctatgactgggctggtggagtctttctatatacatcaaaggagaaaagcaccttcatcaacatgaccagagtggattcagacatgaatgatgcttacttgggttatgctgccgccatcatcttacggaaccgggtgcaaagcctggttctgggggcacctcgatatcagcacatcggcctggtagcgatgttcaggcagaacactggcatgtgggagtccaacgctaatgtcaagggcacccagatcggcgcctacttcggggcctccctctgctccgtggacgtggacagcaacggcagcaccgacctggtcctcatcggggccccccattactacgagcagacccgagggggccaggtgtccgtgtgccccttgcccagggggcagagggctcggtggcagtgtgatgctgttctctacggggagcagggccaaccctggggccgctttggggcagccctaacagtgctgggggacgtaaatggggacaagctgacggacgtggccattggggccccaggagaggaggacaaccggggtgctgtttacctgtttcacggaacctcaggatctggcatcagcccctcccatagccagcggatagcaggctccaagctctctcccaggctccagtattttggtcagtcactgagtgggggccaggacctcacaatggatggactggtagacctgactgtaggagcccaggggcacgtgctgctgctcaggtcccagccagtactgagagtcaaggcaatcatggagttcaatcccagggaagtggcaaggaatgtatttgagtgtaatgatcaggtggtgaaaggcaaggaagccggagaggtcagagtctgcctccatgtccagaagagcacacgggatcggctaagagaaggacagatccagagtgttgtgacttatgacctggctctggactccggccgcccacattcccgcgccgtcttcaatgagacaaagaacagcacacgcagacagacacaggtcttggggctgacccagacttgtgagaccctgaaactacagttgccgaattgcatcgaggacccagtgagccccattgtgctgcgcctgaacttctctctggtgggaacgccattgtctgctttcgggaacctccggccagtgctggcggaggatgctcagagactcttcacagccttgtttccctttgagaagaattgtggcaatgacaacatctgccaggatgacctcagcatcaccttcagtttcatgagcctggactgcctcgtggtgggtgggccccgggagttcaacgtgacagtgactgtgagaaatgatggtgaggactcctacaggacacaggtcaccttcttcttcccgcttgacctgtcctaccggaaggtgtccacactccagaaccagcgctcacagcgatcctggcgcctggcctgtgagtctgcctcctccaccgaagtgtctggggccttgaagagcaccagctgcagcataaaccaccccatcttcccggaaaactcagaggtcacctttaatatcacgtttgatgtagactctaaggcttcccttggaaacaaactgctcctcaaggccaatgtgaccagtgagaacaacatgcccagaaccaacaaaaccgaattccaactggagctgccggtgaaatatgctgtctacatggtggtcaccagccatggggtctccactaaatatctcaacttcacggcctcagagaataccagtcgggtcatgcagcatcaatatcaggtcagcaacctggggcagaggagcctccccatcagcctggtgttcttggtgcccgtccggctgaaccagactgtcatatgggaccgcccccaggtcaccttctccgagaacctctcgagtacgtgccacaccaaggagcgcttgccctctcactccgactttctggctgagcttcggaaggcccccgtggtgaactgctccatcgctgtctgccagagaatccagtgtgacatcccgttctttggcatccaggaagaattcaatgctaccctcaaaggcaacctctcgtttgactggtacatcaagacctcgcataaccacctcctgatcgtgagcacagctgagatcttgtttaacgattccgtgttcaccctgctgccgggacagggggcgtttgtgaggtcccagacggagaccaaagtggagccgttcgaggtccccaaccccctgccgctcatcgtgggcagctctgtcgggggactgctgctcctggccctcatcaccgccgcgctgtacaagctcggcttcttcaagcggcaatacaaggacatgatgagtgaagggggtcccccgggggccgaaccccagtagcggctccttcccgacagagctgcctctcggtggccagcaggactctgcccagaccacacgtagcccccaggctgctggacacgtcggacagcgaagtatccccgacaggacgggcttgggcttccatttgtgtgtgtgcaagtgtgtatgtgcgtgtgtgcgagtgtgtgcaagtgtctgtgtgcaagtgtgtgcacgtgtgcgtgtgcgtgcatgtgcactcgcacgcccatgtgtgagtgtgtgcaagtatgtgagtgtgtccagtgtgtgtgcgtgtgtccatgtgtgtgcagtgtgtgcatgtgtgcgagtgtgtgcatgtgtgtgctcaggggctgtggctcacgtgtgtgactcagagtgtctctggcgtgtgggtaggtgacggcagcgtagcctctccggcagaagggaactgcctgggctcccttgtgcgtgggtaagccgctgctgggttttcctccgggagaggggacggtcaatcctgtgggtgaagagagagggaaacacagcagcatctctccactgaaagaagtgggacttcccgtcgcctgcgagcctgcggcctgctggagcctgcgcagcttggatggatactccatgagaaaagccgtgggtggaaccaggagcctcctccacaccagcgctgatgcccaataaagatgcccactgaggaatcatgaagcttcctttctggattcatttattatttcaatgtgactttaattttttggatggataagcctgtctatggtacaaaaatcacaaggcattcaagtgtacagtgaaaagtctccctttccagatattcaagtcacctccttaaaggtagtcaagattgtgttttgaggtttccttcagacagattccaggcgatgtgcaagtgtatgcacgtgtgcacacaccacacacatacacacacacaagcttttttacacaaatggtagcatactttatattggtctgtatcttgctttttttcaccaatatttctcagacatcggttcatattaagacataaattactttttcattcttttataccgctgcatagtattccattgtgtgagtgtaccataatgtatttaaccagtcttcttttgatatactattttcatctcttgttattgcatctgctgagttaataaatcaaatatatgtcaaaaaaaaaaaaaaaaaaaaaaaaaaaaaaaaaaaaaaaaa

SEQ ID NO: 176 - protein, 1153 aa, Homo sapiens
MALRVLLLTALTLCHGFNLDTENAMTFQENARGFGQSVVQLQGSRVVVGAPQEIVAANQRGSLYQCDYSTGSCEPIRLQVPVEAVNMSLGLSLAATTSPPQLLACGPTVHQTCSENTYVKGLCFLFGSNLRQQPQKFPEALRGCPQEDSDIAFLIDGSGSIIPHDFRRMKEFVSTVMEQLKKSKTLFSLMQYSEEFRIHFTFKEFQNNPNPRSLVKPITQLLGRTHTATGIRKVVRELFNITNGARKNAFKILVVITDGEKFGDPLGYEDVIPEADREGVIRYVIGVGDAFRSEKSRQELNTIASKPPRDHVFQVNNFEALKTIQNQLREKIFAIEGTQTGSSSSFEHEMSQEGFSAAITSNGPLLSTVGSYDWAGGVFLYTSKEKSTFINMTRVDSDMNDAYLGYAAAIILRNRVQSLVLGAPRYQHIGLVAMFRQNTGMWESNANVKGTQIGAYFGASLCSVDVDSNGSTDLVLIGAPHYYEQTRGGQVSVCPLPRGQRARWQCDAVLYGEQGQPWGRFGAALTVLGDVNGDKLTDVAIGAPGEEDNRGAVYLFHGTSGSGISPSHSQRIAGSKLSPRLQYFGQSLSGGQDLTMDGLVDLTVGAQGHVLLLRSQPVLRVKAIMEFNPREVARNVFECNDQVVKGKEAGEVRVCLHVQKSTRDRLREGQIQSVVTYDLALDSGRPHSRAVFNETKNSTRRQTQVLGLTQTCETLKLQLPNCIEDPVSPIVLRLNFSLVGTPLSAFGNLRPVLAEDAQRLFTALFPFEKNCGNDNICQDDLSITFSFMSLDCLVVGGPREFNVTVTVRNDGEDSYRTQVTFFFPLDLSYRKVSTLQNQRSQRSWRLACESASSTEVSGALKSTSCSINHPIFPENSEVTFNITFDVDSKASLGNKLLLKANVTSENNMPRTNKTEFQLELPVKYAVYMVVTSHGVSTKYLNFTASENTSRVMQHQYQVSNLGQRSLPISLVFLVPVRLNQTVIWDRPQVTFSENLSSTCHTKERLPSHSDFLAELRKAPVVNCSIAVCQRIQCDIPFFGIQEEFNATLKGNLSFDWYIKTSHNHLLIVSTAEILFNDSVFTLLPGQGAFVRSQTETKVEPFEVPNPLPLIVGSSVGGLLLLALITAALYKLGFFKRQYKDMMSEGGPPGAEPQ

SEQ ID NO: 177 - DNA, 1364 bp, Homo sapiens
gccgaagagttcacaagtgtgaagcctggaagccggcgggtgccgctgtgtaggaaagaagctaaagcacttccagagcctgtccggagctcagaggttcggaagacttatcgaccatggagcgcgcgtcctgcttgttgctgctgctgctgccgctggtgcacgtctctgcgaccacgccagaaccttgtgagctggacgatgaagatttccgctgcgtctgcaacttctccgaacctcagcccgactggtccgaagccttccagtgtgtgtctgcagtagaggtggagatccatgccggcggtctcaacctagagccgtttctaaagcgcgtcgatgcggacgccgacccgcggcagtatgctgacacggtcaaggctctccgcgtgcggcggctcacagtgggagccgcacaggttcctgctcagctactggtaggcgccctgcgtgtgctagcgtactcccgcctcaaggaactgacgctcgaggacctaaagataaccggcaccatgcctccgctgcctctggaagccacaggacttgcactttccagcttgcgcctacgcaacgtgtcgtgggcgacagggcgttcttggctcgccgagctgcagcagtggctcaagccaggcctcaaggtactgagcattgcccaagcacactcgcctgccttttcctgcgaacaggttcgcgccttcccggcccttaccagcctagacctgtctgacaatcctggactgggcgaacgcggactgatggcggctctctgtccccacaagttcccggccatccagaatctagcgctgcgcaacacaggaatggagacgcccacaggcgtgtgcgccgcactggcggcggcaggtgtgcagccccacagcctagacctcagccacaactcgctgcgcgccaccgtaaaccctagcgctccgagatgcatgtggtccagcgccctgaactccctcaatctgtcgttcgctgggctggaacaggtgcctaaaggactgccagccaagctcagagtgctcgatctcagctgcaacagactgaacagggcgccgcagcctgacgagctgcccgaggtggataacctgacactggacgggaatcccttcctggtccctggaactgccctcccccacgagggctcaatgaactccggcgtggtcccagcctgtgcacgttcgaccctgtcggtgggggtgtcgggaaccctggtgctgctccaaggggcccggggctttgcctaagatccaagacagaataatgaatggactcaaactgccttggcttcaggggagtcccgtcaggacgttgaggacttttcgaccaattcaaccctttgccccacctttattaaaatcttaaac

SEQ ID NO: 178 - protein, 375 aa, Homo sapiens
MERASCLLLLLLPLVHVSATTPEPCELDDEDFRCVCNFSEPQPDWSEAFQCVSAVEVEIHAGGLNLEPFLKRVDADADPRQYADTVKALRVRRLTVGAAQVPAQLLVGALRVLAYSRLKELTLEDLKITGTMPPLPLEATGLALSSLRLRNVSWATGRSWLAELQQWLKPGLKVLSIAQAHSPAFSCEQVRAFPALTSLDLSDNPGLGERGLMAALCPHKFPAIQNLALRNTGMETPTGVCAALAAAGVQPHSLDLSHNSLRATVNPSAPRCMWSSALNSLNLSFAGLEQVPKGLPAKLRVLDLSCNRLNRAPQPDELPEVDNLTLDGNPFLVPGTALPHEGSMNSGVVPACARSTLSVGVSGTLVLLQGARGFA

SEQ ID NO: 179 - DNA, 2633 bp, Homo sapiens
ccgcggcaagaacatccctcccagccagcagattacaatgctgcaaactaaggatctcatctggactttgtttttcctgggaactgcagtttctctgcaggtggatattgttcccagccagggggagatcagcgttggagagtccaaattcttcttatgccaagtggcaggagatgccaaagataaagacatctcctggttctcccccaatggagaaaagctcaccccaaaccagcagcggatctcagtggtgtggaatgatgattcctcctccaccctcaccatctataacgccaacatcgacgacgccggcatttacaagtgtgtggttacaggcgaggatggcagtgagtcagaggccaccgtcaacgtgaagatctttcagaagctcatgttcaagaatgcgccaaccccacaggagttccgggagggggaagatgccgtgattgtgtgtgatgtggtcagctccctcccaccaaccatcatctggaaacacaaaggccgagatgtcatcctgaaaaaagatgtccgattcatagtcctgtccaacaactacctgcagatccggggcatcaagaaaacagatgagggcacttatcgctgtgagggcagaatcctggcacggggggagatcaacttcaaggacattcaggtcattgtgaatgtgccacctaccatccgggccaggcagaatattgtgaatgccaccgccaacctcggccagtccgtcaccctggtgtgcgatgccgaacggttcccagagcccaccatgagctggacaaaggatggggaacagatagagcaagaggaagacgatgagaagtacatcttcagcgacgatagttcccagctgaccatcaaaaaggtggataagaacgacgaggctgagtacatctgcattgctgagaacaaggctggcgagcaggatgcgaccatccacctcaaagtctttgcaaaacccaaaatcacatatgtagagaaccagactgccatggaattagaggagcaggtcactcttacctgtgaagcctccggagaccccattccctccatcacctggaggacttctacccggaacatcagcagcgaagaaaagactctggatgggcacatggtggtgcgtagccatgcccgtgtgtcgtcgctgaccctgaagagcatccagtacactgatgccggagagtacatctgcaccgccagcaacaccatcggccaggactcccagtccatgtaccttgaagtgcaatatgccccaaagctacagggccctgtggctgtgtacacttgggaggggaaccaggtgaacatcacctgcgaggtatttgcctatcccagtgccacgatctcatggtttcgggatggccagctgctgccaagctccaattacagcaatatcaagatctacaacaccccctctgccagctatctggaggtgaccccagactctgagaatgattttgggaactacaactgtactgcagtgaaccgcattgggcaggagtccttcgaattcatccttgttcaagcagacaccccctcttcaccatccatcgaccaggtggagccatactccagcacagcccaggtgcagtttgatgaaccagaggccacaggtggggtgcccatcctcaaatacaaagctgagtggagagcagtgggtgaagaagtatggcattccaagtggtatgatgccaaggaagccagcatggagggcatcgtcaccatcgtgggcctgaagcccgaaacaacgtacgccgtaaggctggcggcgctcaatggcaaagggctgggtgagatcagcgcggcctccgagttcaagacgcagccagtccaaggggaacccagtgcacctaagctcgaagggcagatgggagaggatggaaactctattaaagtgaacctgatcaagcaggatgacggcggctcccccatcagacactatctggtcaggtaccgagcgctctcctccgagtggaaaccagagatcaggctcccgtctggcagtgaccacgtcatgctgaagtccctggactggaatgctgagtatgaggtctacgtggtggctgagaaccagcaaggaaaatccaaggcggctcattttgtgttcaggacctcggcccagcccacagccatcccagccaacggcagccccacctcaggcctgagcaccggggccatcgtgggcatcctcatcgtcatcttcgtcctgctcctggtggttgtggacatcacctgctacttcctgaacaagtgtggcctgttcatgtgcattgcggtcaacctgtgtggaaaagccgggcccggggccaagggcaaggacatggaggagggcaaggccgccttctcgaaagatgagtccaaggagcccatcgtggaggttcgaacggaggaggagaggaccccaaaccatgatggagggaaacacacagagcccaacgagaccacgccactgacggagcccgagaagggccccgtagaagcaaagccagagtgccaggagacagaaacgaagccagcgccagccgaagtcaagacggtccccaatgacgccacacagacaaaggagaacgagagcaaagcatgatgggtgaagagaaccgagcaaagatcaaaataaaaagtgacacagcagc

SEQ ID NO: 180 - protein, 848 aa, Homo sapiens [sequence omitted]

SEQ ID NO: 181 - DNA, 1702 bp, Homo sapiens
agactcaacaagagctccagcaaagactttcactgtagcttgacttgacctgagattaactagggaatcttgagaataaagatgagctctgaaaattgtttcgtagcagagaacagctctttgcatccggagagtggacaagaaaatgatgccaccagtccccatttctcaacacgtcatgaagggtccttccaagttcctgtcctgtgtgctgtaatgaatgtggtcttcatcaccattttaatcatagctctcattgccttatcagtgggccaatacaattgtccaggccaatacacattctcaatgccatcagacagccatgtttcttcatgctctgaggactgggttggctaccagaggaaatgctactttatttctactgtgaagaggagctggacttcagcccaaaatgcttgttctgaacatggtgctactcttgctgtcattgattctgaaaaggacatgaactttctaaaacgatacgcaggtagagaggaacactgggttggactgaaaaaggaacctggtcacccatggaagtggtcaaatggcaaagaatttaacaactggttcaacgttacagggtctgacaagtgtgtttttctgaaaaacacagaggtcagcagcatggaatgtgagaagaatttatactggatatgtaacaaaccttacaaataataaggaaacatgttcacttattgactattatagaatggaactcaaggaaatctgtgtcagtggatgctgctctgtggtccgaagtcttccatagagactttgtgaaaaaaaattttatagtgtcttgggaattttcttccaaacagaactatggaaaaaaaggaagaaattccaggaaaatctgcactgtgggcttttattgccatgagctagaagcatcacaggttgaccaataaccatgcccaagaatgagaagaatgactatgcaacctttggatgcactttatattattttgaatccagaaataatgaaataactaggcgtggacttactatttattgctgaatgactaccaacagtgagagcccttcatgcatttgcactactggaaggagttagatgttggtactagatactgaatgtaaacaaaggaattatggctggtaacataggtttttagtctaattgaatcccttaaactcagggagcatttataaatggacaaatgcttatgaaactaagatttgtaatatttctctctttttagagaaatttgccaatttactttgttatttttccccaaaaagaatgggatgatcgtgtatttatttttttacttcctcagctgtagacaggtccttttcgatggtacatatttctttgcctttataatcttttatacagtgtcttacagagaaaagacataagcaaagactatgaggaatatttgcaagacatagaatagtgttggaaaatgtgcaatatgtgatgtggcaaatctctattaggaaatattctgtaatcttcagacctagaataatactagtcttataataggtttgtgactttcctaaatcaattctattacgtgcaatacttcaatacttcatttaaaatatttttatgtgcaataaaatgtatttgtttgtattttgtgttcagtacaattataagctgtttttatatatgtgaaataaaagtagaataaacacaaaaaaaaaaaaaaaaaaaaaaaaaaaa

SEQ ID NO: 182 - protein, 199 aa, Homo sapiens
MSSENCFVAENSSLHPESGQENDATSPHFSTRHEGSFQVPVLCAVMNVVFITILIIALIALSVGQYNCPGQYTFSMPSDSHVSSCSEDWVGYQRKCYFISTVKRSWTSAQNACSEHGATLAVIDSEKDMNFLKRYAGREEHWVGLKKEPGHPWKWSNGKEFNNWFNVTGSDKCVFLKNTEVSSMECEKNLYWICNKPYK

SEQ ID NO: 183 - DNA, 1642 bp, Homo sapiens
ctctaaaggttcgggggtggaatccttgggccgctgggcaagcggcgagacctggccagggccagcgagccgaggacagagggcgcacggagggccgggccgcagccccggccgcttgcagaccccgccatggacccgttcctggtgctgctgcactcggtgtcgtccagcctgtcgagcagcgagctgaccgagctcaagttcctatgcctcgggcgcgtgggcaagcgcaagctggagcgcgtgcagagcggcctagacctcttctccatgctgctggagcagaacgacctggagcccgggcacaccgagctcctgcgcgagctgctcgcctccctgcggcgccacgacctgctgcggcgcgtcgacgacttcgaggcgggggcggcggccggggccgcgcctggggaagaagacctgtgtgcagcatttaacgtcatatgtgataatgtggggaaagattggagaaggctggctcgtcagctcaaagtctcagacaccaagatcgacagcatcgaggacagatacccccgcaacctgacagagcgtgtgcgggagtcactgagaatctggaagaacacagagaaggagaacgcaacagtggcccacctggtgggggctctcaggtcctgccagatgaacctggtggctgacctggtacaagaggttcagcaggcccgtgacctccagaacaggagtggggccatgtccccgatgtcatggaactcagacgcatctacctccgaagcgtcctgatgggccgctgctttgcgctggtggaccacaggcatctacacagcctggactttggttctctccaggaaggtagcccagcactgtgaagacccagcaggaagccaggctgagtgagccacagaccacctgcttctgaactcaagctgcgtttattaatgcctctcccgcaccaggccgggcttgggccctgcacagatatttccatttcttcctcactatgacactgagcaagatcttgtctccactaaatgagctcctgcgggagtagttggaaagttggaaccgtgtccagcacagaaggaatctgtgcagatgagcagtcacactgttactccacagcggaggagaccagctcagaggcccaggaatcggagcgaagcagagaggtggagaactgggatttgaacccccgccatccttcaccagagcccatgctcaaccactgtggcgttctgctgcccctgcagttggcagaaaggatgttttgtcccatttccttggaggccaccgggacagacctggacactagggtcaggcggggtgctgtggtggggagaggcatggctggggtgggggtggggagacctggttggccgtggtccagctcttggcccctgtgtgagttgagtctcctctctgagactgctaagtaggggcagtgatggttgccaggacgaattgagataatatctgtgaggtgctgatgagtgattgacacacagcactctctaaatcttccttgtgaggattatgggtcctgcaattctacagtttcttactgttttgtatcaaaatcactatctttctgataacagaattgccaaggcagcgggatctcgtatctttaaaaagcagtcctcttattcctaaggtaatcctattaaaa

SEQ ID NO: 184 - protein, 208 aa, Homo sapiens
MDPFLVLLHSVSSSLSSSELTELKFLCLGRVGKRKLERVQSGLDLFSMLLEQNDLEPGHTELLRELLASLRRHDLLRRVDDFEAGAAAGAAPGEEDLCAAFNVICDNVGKDWRRLARQLKVSDTKIDSIEDRYPRNLTERVRESLRIWKNTEKENATVAHLVGALRSCQMNLVADLVQEVQQARDLQNRSGAMSPMSWNSDASTSEAS

SEQ ID NO: 185 - DNA, 1475 bp, Homo sapiens
ggcacgagggagcggagcctggcgggcgtgggaacccaggccccgccgaggcggccaggaggtgagatggcagctgggcaaaatgggcacgaagagtgggtgggcagcgcatacctgtttgtggagtcctcgctggacaaggtggtcctgtcggatgcctacgcgcacccccagcagaaggtggcagtgtacagggctctgcaggctgccttggcagagagcggcgggagcccggacgtgctgcagatgctgaagatccaccgcagcgacccgcagctgatcgtgcagctgcgattctgcgggcggcagccctgtggccgcttcctccgcgcctaccgcgagggggcgctgcgcgccgcgctgcagaggagcctggcggccgcgctcgcccagcactcggtgccgctgcaactggagctgcgcgccggcgccgagcggctggacgctttgctggcggacgaggagcgctgtttgagttgcatcctagcccagcagcccgaccggctccgggatgaagaactggctgagctggaggatgcgctgcgaaatctgaagtgcggctcgggggcccggggtggcgacggggaggtcgcttcggcccccttgcagcccccggtgccctctctgtcggaggtgaagccgccgccgccgccgccacctgcccagacttttctgttccagggtcagcctgtagtgaatcggccgctgagcctgaaggaccaacagacgttcgcgcgctctgtgggtctcaaatggcgcaaggtggggcgctcactgcagcgaggctgccgggcgctgcgggacccggcgctggactcgctggcctacgagtacgagcgcgagggactgtacgagcaggccttccagctgctgcggcgcttcgtgcaggccgagggccgccgcgccacgctgcagcgcctggtggaggcactcgaggagaacgagctcaccagcctggcagaggacttgctgggcctgaccgatcccaatggcggcctggcctagaccaggggtgcagccagcttttggagaacctggatggccttagggttccttctgcggctattgctgaacccctgtccatccacgggaccctgaaactccacttggcctatctgctggacctgctggggcagagttgattgccttccccaggagccagaccactgggggtgcatcattggggattctgcctcaggtactttgatagagtgtggggtgggggggacctgctttggagatcagcctcaccttctcccatcccagaagcggggcttacagccagcccttacagtttcactcatgaagcaccttgatctttggtgtcctggacttcatcctgggtgctgcagatactgcagtgaagtaaaacaggaatcaatcttgcctgcccccagctcacactcagcgtgggaccccgaatgttaagcaatgataataaagtataacacggaaaaaaaaaaaaaaaaaaaaaa

SEQ ID NO: 186 - protein, 312 aa, Homo sapiens
MAAGQNGHEEWVGSAYLFVESSLDKVVLSDAYAHPQQKVAVYRALQAALAESGGSPDVLQMLKIHRSDPQLIVQLRFCGRQPCGRFLRAYREGALRAALQRSLAAALAQHSVPLQLELRAGAERLDALLADEERCLSCILAQQPDRLRDEELAELEDALRNLKCGSGARGGDGEVASAPLQPPVPSLSEVKPPPPPPPAQTFLFQGQPVVNRPLSLKDQQTFARSVGLKWRKVGRSLQRGCRALRDPALDSLAYEYEREGLYEQAFQLLRRFVQAEGRRATLQRLVEALEENELTSLAEDLLGLTDPNGGLA

SEQ ID NO: 187 - DNA, 600 bp, Homo sapiens
atggaagccagagacaagcaggtactccgctccctgcgtctggagctgggtgccgaggtactggtggaaggactggttcttcagtacctttaccaggaaggaattttgacagaaaaccacattcaagaaatcaaagctcaaaccacaggcctccggaagacaatgctgttgctggacatcctgccttccaggggccccaaagcttttgacaccttcctcgattccctccaggaatttccctgggtaagagagaagctggagaaggcgagagaggaagtcacagccgagctgcctacaggtgactggatggccggaatcccctcacacatcctcagcagctcgccatcagaccagcagattaaccagctggctcagaagctaggcccggagtgggagcccgtggtcctgtctctgggactgtcccagaccgacatctaccgctgcaaggccaaccatccccacaacgtgcattcgcaggtggtggaggcctttgtccgctggcgccagcgttttgggaagcaggccaccttcctaagcttacacaagggcctccaggcagtggaggctgatccctccctgctccagcacatgctggagtga

SEQ ID NO: 188 - protein, 199 aa, Homo sapiens [sequence omitted]

SEQ ID NO: 189 - DNA, 1642 bp, Homo sapiens; identical to SEQ ID NO: 183

SEQ ID NO: 190 - protein, 208 aa, Homo sapiens; identical to SEQ ID NO: 184

SEQ ID NO: 191 - DNA, 3492 bp, Homo sapiens
gggagcacatgccggctcagagaatactatgaccagacagctcagatgtgctgcagcaaatgctcgccgggccaacatgcaaaagtcttctgtaccaagacctcggacaccgtgtgtgactcctgtgaggacagcacatacacccagctctggaactgggttcccgagtgcttgagctgtggctcccgctgtagctctgaccaggtggaaactcaagcctgcactcgggaacagaaccgcatctgcacctgcaggcccggctggtactgcgcgctgagcaagcaggaggggtgccggctgtgcgcgccgctgcgcaagtgccgcccgggcttcggcgtggccagaccaggaactgaaacatcagacgtggtgtgcaagccctgtgccccggggacgttctccaacacgacttcatccacggatatttgcaggccccaccagatctgtaacgtggtggccatccctgggaatgcaagcatggatgcagtctgcacgtccacgtcccccacccggagtatggccccaggggcagtacacttaccccagccagtgtccacacgatcccaacacacgcagccaactccagaacccagcactgctccaagcacctccttcctgctcccaatgggccccagccccccagctgaagggagcactggcgacttcgctcttccagttggactgattgtgggtgtgacagccttgggtctactaataataggagtggtgaactgtgtcatcatgacccaggtgaaaaagaagcccttgtgcctgcagagagaagccaaggtgcctcacttgcctgccgataaggcccggggtacacagggccccgagcagcagcacctgctgatcacagcgccgagctccagcagcagctccctggagagctcggccagtgcgttggacagaagggcgcccactcggaaccagccacaggcaccaggcgtggaggccagtggggccggggaggcccgggccagcaccgggagctcagattcttcccctggtggccatgggacccaggtcaatgtcacctgcatcgtgaacgtctgtagcagctctgaccacagctcacagtgctcctcccaagccagctccacaatgggagacacagattccagcccctcggagtccccgaaggacgagcaggtccccttctccaaggaggaatgtgcctttcggtcacagctggagacgccagagaccctgctggggagcaccgaagagaagcccctgccccttggagtgcctgatgctgggatgaagcccagttaaccaggccggtgtgggctgtgtcgtagccaaggtgggctgagccctggcaggatgaccctgcgaaggggccctggtccttccaggcccccaccactaggactctgaggctctttctgggccaagttcctctagtgccctccacagccgcagcctccctctgacctgcaggccaagagcagaggcagcgagttgtggaaagcctctgctgccatggcgtgtccctctcggaaggctggctgggcatggacgttcggggcatgctggggcaagtccctgactctctgtgacctgccccgcccagctgcacctgccagcctggcttctggagcccttgggttttttgtttgtttgtttgtttgtttgtttgtttctccccctgggctctgccccagctctggcttccagaaaaccccagcatccttttctgcagaggggctttctggagaggagggatgctgcctgagtcacccatgaagacaggacagtgcttcagcctgaggctgagactgcgggatggtcctggggctctgtgcagggaggaggtggcagccctgtagggaacggggtccttcaagttagctcaggaggcttggaaagcatcacctcaggccaggtgcagtggctcacgcctatgatcccagcactttgggaggctgaggcgggtggatcacctgaggttaggagttcgagaccagcctggccaacatggtaaaaccccatctctactaaaaatacagaaattagccgggcgtggtggcgggcacctatagtcccagctactcagaagcctgaggctgggaaatcgtttgaacccgggaagcggaggttgcagggagccgagatcacgccactgcactccagcctgggcgacagagcgagagtctgtctcaaaagaaaaaaaaaaagcaccgcctccaaatgctaacttgtccttttgtaccatggtgtgaaagtcagatgcccagagggcccaggcaggccaccatattcagtgctgtggcctgggcaagataacgcacttctaactagaaatctgccaattttttaaaaaagtaagtaccactcaggccaacaagccaacgacaaagccaaactctgccagccacatccaaccccccacctgccatttgcaccctccgccttcactccggtgtgcctgcagccccgcgcctccttccttgctgtcctaggccacaccatctcctttcagggaatttcaggaactagagatgactgagtcctcgtagccatctctctactcctacctcagcctagaccctcctcctcccccagaggggtgggttcctcttccccactccccaccttcaattcctgggccccaaacgggctgccctgccactttggtacatggccagtgtgatcccaagtgccagtcttgtgtctgcgtctgtgttgcgtgtcgtgggtgtgtgtagccaaggtcggtaagttgaatggcctgccttgaagccactgaagctgggattcctccccattagagtcagccttccccctcccagccagggccctgcagaggggaaaccagtgtagccttgcccggattctgggaggaagcaggttgaggggctcctggaaaggctcagtctcaggagcatggggataaaggagaaggcatgaaattgtctagcagagcaggggcagggtgataaattgttgataaattccactggacttgagcttggcagctgaactattggagggtgggagagcccagccattaccatggagacaagaagggttttccaccctggaatcaagatgtcagactggctggctgcagtgacgtgcacctgtactcaggaggctgaggggaggatcactggagcccaggagtttgaggctgcagcgagctatgatcgcgccactacactccagcctgagcaacagagtgagaccctgtctcttaaagaaaaaaaaagtcagactgctgggactggccaggtttctgcccacattggacccacatgaggacatgatggagcgcacctgccccctggtggacagtcctgggagaacctcaggcttccttggcatcacagggcagagccgggaagcgatgaatttggagactctgtggggccttggttcccttgtgtgtgtgtgttgatcccaagacaatgaaagtttgcactgtatgctggacggcattcctgcttatcaataaacctgtttgttttacacgtcgaaaaaaaa

SEQ ID NO: 192 - protein, 425 aa, Homo sapiens
GSTCRLREYYDQTAQMCCSKCSPGQHAKVFCTKTSDTVCDSCEDSTYTQLWNWVPECLSCGSRCSSDQVETQACTREQNRICTCRPGWYCALSKQEGCRLCAPLRKCRPGFGVARPGTETSDVVCKPCAPGTFSNTTSSTDICRPHQICNVVAIPGNASMDAVCTSTSPTRSMAPGAVHLPQPVSTRSQHTQPTPEPSTAPSTSFLLPMGPSPPAEGSTGDFALPVGLIVGVTALGLLIIGVVNCVIMTQVKKKPLCLQREAKVPHLPADKARGTQGPEQQHLLITAPSSSSSSLESSASALDRRAPTRNQPQAPGVEASGAGEARASTGSSDSSPGGHGTQVNVTCIVNVCSSSDHSSQCSSQASSTMGDTDSSPSESPKDEQVPFSKEECAFRSQLETPETLLGSTEEKPLPLGVPDAGMKPS

SEQ ID NO: 193 - DNA, 1799 bp, Homo sapiens
cccacgcgtccgcataaatcagcacgcggccggagaaccccgcaatctctgcgcccacaaaatacaccgacgatgcccgatctactttaagggctgaaacccacgggcctgagagactataagagcgttccctaccgccatggaacaacggggacagaacgccccggccgcttcgggggcccggaaaaggcacggcccaggacccagggaggcgcggggagccaggcctgggctccgggtccccaagacccttgtgctcgttgtcgccgcggtcctgctgttggtctcagctgagtctgctctgatcacccaacaagacctagctccccagcagagagcggccccacaacaaaagaggtccagcccctcagagggattgtgtccacctggacaccatatctcagaagacggtagagattgcatctcctgcaaatatggacaggactatagcactcactggaatgacctccttttctgcttgcgctgcaccaggtgtgattcaggtgaagtggagctaagtccctgcaccacgaccagaaacacagtgtgtcagtgcgaagaaggcaccttccgggaagaagattctcctgagatgtgccggaagtgccgcacagggtgtcccagagggatggtcaaggtcggtgattgtacaccctggagtgacatcgaatgtgtccacaaagaatcaggcatcatcataggagtcacagttgcagccgtagtcttgattgtggctgtgtttgtttgcaagtctttactgtggaagaaagtccttccttacctgaaaggcatctgctcaggtggtggtggggaccctgagcgtgtggacagaagctcacaacgacctggggctgaggacaatgtcctcaatgagatcgtgagtatcttgcagcccacccaggtccctgagcaggaaatggaagtccaggagccagcagagccaacaggtgtcaacatgttgtcccccggggagtcagagcatctgctggaaccggcagaagctgaaaggtctcagaggaggaggctgctggttccagcaaatgaaggtgatcccactgagactctgagacagtgcttcgatgactttgcagacttggtgccctttgactcctgggagccgctcatgaggaagttgggcctcatggacaatgagataaaggtggctaaagctgaggcagcgggccacagggacaccttgtacacgatgctgataaagtgggtcaacaaaaccgggcgagatgcctctgtccacaccctgctggatgccttggagacgctgggagagagacttgccaagcagaagattgaggaccacttgttgagctctggaaagttcatgtatctagaaggtaatgcagactctgccttgtcctaagtgtgattctcttcaggaagtgagaccttccctggtttaccttttttctggaaaaagcccaactggactccagtcagtaggaaagtgccacaattgtcacatgaccggtactggaagaaactctcccatccaacatcacccagtggatggaacatcctgtaacttttcactgcacttggcattatttttataagctgaatgtgataataaggacactatggaaatgtctggatcattccgtttgtgcgtactttgagatttggtttgggatgtcattgttttcacagcacttttttatcctaatgtaaatgctttatttatttatttgggctacattgtaagatccatctacaaaaaaaaaaaaaaaaaaaaaagggcggccgcgactctagagtcgacctgcagaagcttggccgccatggcc

SEQ ID NO: 194 - protein, 411 aa, Homo sapiens [sequence omitted]

SEQ ID NO: 195 - DNA, 683 bp, Homo sapiens
gggctgcaggaattcggcacgagcttagctgaagatgactgacagtgttatttattccatgttagagttgcctacggcaacccaagcccagaatgactatggaccacagcaaaaatcttcctcttccaggccttcttgttcttgccttgtggcaatagctttggggcttctgactgcagttcttctgagtgtgctgctataccagtggatcctgtgccagggctccaactactccacttgtgccagctgtcctagctgcccagaccgctggatgaaatatggtaaccattgttattatttctcagtggaggaaaaggactggaattctagtctggaattctgcctagccagagactcacacctccttgtgataacggacaatcaggaaatgagcctgctccaagttttcctcagtgaggccttttgctggattggtctgaggaacaattctggctggaggtgggaagatggatcacctctaaacttctcaaggatttcttctaatagctttgtgcagacatgcggtgccatcaacaaaaatggtcttcaagcctcaagctgtgaagttcctttacactgggtgtgtaagaaggtcagactttgatagatgaccactctgtcctgaccctcagatctgtcatgtatccctaaaaggagggagctggccactggctgttgggaaa

SEQ ID NO: 196 - protein, 189 aa, Homo sapiens
MTDSVIYSMLELPTATQAQNDYGPQQKSSSSRPSCSCLVAIALGLLTAVLLSVLLYQWILCQGSNYSTCASCPSCPDRWMKYGNHCYYFSVEEKDWNSSLEFCLARDSHLLVITDNQEMSLLQVFLSEAFCWIGLRNNSGWRWEDGSPLNFSRISSNSFVQTCGAINKNGLQASSCEVPLHWVCKKVRL

SEQ ID NO: 197 - DNA, 2967 bp, Homo sapiens
tagctccgcgcgggggcttcctcggctccttgctgttgccgccgccgcagctgctgccgcggttggtggggttgggtgagaggaggagctgtcgcggaccctgtagagtcggtctctgttgctctttttgcctgaggagtcttccatcctacgtcgagctctgactcccgtgctgtcgagagggagtccccggggacacctcggcacgcagcggagatgcctctttttgccaccaatcccttcgatcaggatgttgagaaagcaaccagcgagatgaatactgctgaggactggggcctcattttggatatctgtgataaagttggtcagtctcgcactggacctaaggattgtcttcggtctattatgagaagagtgaaccacaaagatcctcacgttgctatgcaggctttgactcttctaggagcatgtgtatcaaactgtggcaaaatttttcatttagaagtatgttcaagagattttgctagtgaagtaagcaacgtattaaataagggtcatcctaaagtatgtgaaaaattaaaggctcttatggttgaatggacagatgaatttaagaatgatccacagcttagtctaatatcagcaatgattaagaaccttaaggaacaaggagttacgttcccagctattggctctcaggctgcagaacaagcaaaagcaagcccagctcttgtagccaaggatcctggtactgtggctaacaaaaaagaagaagaagatttagcaaaagccattgagttgtctctcaaggaacaaaggcagcagtcaaccaccctttccactttgtatccaagcacatccagtctcttaactaaccaccaacatgaaggccgaaaagttcgtgctatatatgactttgaagctgctgaagacaatgaacttacttttaaagctggagaaattattacagttcttgatgacagtgatcctaactggtggaaaggtgaaacccatcaaggcatagggttatttccttctaattttgtgactgcagatctcactgctgaaccagaaatgattaaaacagagaagaagacggtacaatttagtgatgatgttcaggtagagacaatagaaccagagccggaaccagcctttattgatgaagataaaatggaccagttgctacagatgctgcaaagtacagaccccagtgatgatcagccagacctaccagagctgcttcatcttgaagcaatgtgtcaccagatgggacctctcattgatgaaaagctggaagatattgatagaaaacattcagaactctcagaacttaatgtgaaagtgatggaggccctttccttatataccaagttaatgaacgaagatccgatgtattccatgtatgcaaagttacagaatcagccatattatatgcagtcatctggtgtttctggttctcaggtgtatgcagggcctcctccaagtggtgcctacctggttgcagggaacgcgcagatgagccacctccagagctacagtcttcccccggagcagctgtcttctctcagccaggcagtggtcccaccatccgcaaacccagcccttcctagtcagcagactcaggccgcttacccaaatacaatggtcagttccgttcaaggaaacacatatcccagccaggcgccagtatatagtcctcctcctgccgctactgctgctgctgcaactgccgatgtcactctgtaccagaatgcaggacctaatatgccccaggtgccaaactataacttaacatcatcaactctgcctcagcccggaggcagccaacagccacctcagccacagcaaccatattctcagaaggctctgctataggacccggtgttcctcttggtggcagatacctgctaaatgccactgacaatgttatgagattcattactatcttaagatgtgtttatcctcagcttataggaatctctccaggtcaacaggttcaaatattcaagaaggtagaactctcctcaatttacactgactttttagaggttcttccccccccgcccctgcagaggaatgaaactacttacaacatttaattcctttcataatatgaaagaattgatacaaggctatttgtctcgtaaacctggtctgcagaaagtcaaacttacaaaaactgttgtgacaaatgttatgtacatatattgatatgtaactgcattagtggccattttgaatcacagtggtgatcgtgtgaatatatttaacactgtgttaaattaatttacgttgctattttattttaatcataaacaactaccatgtttcttaatgttttgtgtaaatttaaggtaattatactatccttttaaacttcaagaaaacaaagttgttagcgtatttacatgaaggcgcattatgttgtcgtgtgtttcagtttcacattaaactgaaccttttactaattgtgagctaaagagatatatatatatatgtgtgtgtatatatatatatctacatgtctttctgtagcctctgcatactactggctgtcatcacaccagcgtacagtagctaaatttttggtgcaattatagcaaatgataatgttcccttttgaacttttacattttggcatgacatttcagagtattgtgggaccatgagacaaaattaagtacgatcacattctttatttctcattttaaagaaatgatgttggtttaccttttcctagttgaagatagtaattaggtttctaagctgtatactgtgtttattggtggcagtgacaccaaagatagaggcaatggatagaaatttttaaactggaaagaaaacctgaattacactacattttcgaagtctcttgtaattatttgggatatcaacaaaatttgattcgtctgtctaatcccttgctagtattttaaatatgtctttaacacattgtatcctttaattcttcattaaaatggaaataagtagatgtttcaaagt

SEQ ID NO: 198 - protein, 540 aa, Homo sapiens
MPLFATNPFDQDVEKATSEMNTAEDWGLILDICDKVGQSRTGPKDCLRSIMRRVNHKDPHVAMQALTLLGACVSNCGKIFHLEVCSRDFASEVSNVLNKGHPKVCEKLKALMVEWTDEFKNDPQLSLISAMIKNLKEQGVTFPAIGSQAAEQAKASPALVAKDPGTVANKKEEEDLAKAIELSLKEQRQQSTTLSTLYPSTSSLLTNHQHEGRKVRAIYDFEAAEDNELTFKAGEIITVLDDSDPNWWKGETHQGIGLFPSNFVTADLTAEPEMIKTEKKTVQFSDDVQVETIEPEPEPAFIDEDKMDQLLQMLQSTDPSDDQPDLPELLHLEAMCHQMGPLIDEKLEDIDRKHSELSELNVKVMEALSLYTKLMNEDPMYSMYAKLQNQPYYMQSSGVSGSQVYAGPPPSGAYLVAGNAQMSHLQSYSLPPEQLSSLSQAVVPPSANPALPSQQTQAAYPNTMVSSVQGNTYPSQAPVYSPPPAATAAAATADVTLYQNAGPNMPQVPNYNLTSSTLPQPGGSQQPPQPQQPYSQKALL

SEQ ID NO: 199 - DNA, 2531 bp, Homo sapiens
tctaagtagtatcttggaaattcagagagatactcatcctacctgaatataaactgagataaatccagtaaagaaagtgtagtaaattctacataagagtctatcattgatttcttttggtggtaaaaatcttagttcatgtgaagaaatttcatgtgaatgttttagctatcaaacagcactgtcacctactcatgcacaaaactgcctcccaaagacttttcccaggtccctcgtatcaaaacattaagagtataatggaagatagcacgatcttgtcagattggacaaacagcaacaaacaaaaaatgaagtatgacttttcctgtgaactctacagaatgtctacatattcaactttccccgccggggtgcctgtctcagaaaggagtcttgctcgtgctggtttttattatactggtgtgaatgacaaggtcaaatgcttctgttgtggcctgatgctggataactggaaactaggagacagtcctattcaaaagcataaacagctatatcctagctgtagctttattcagaatctggtttcagctagtctgggatccacctctaagaatacgtctccaatgagaaacagttttgcacattcattatctcccaccttggaacatagtagcttgttcagtggttcttactccagcctttctccaaaccctcttaattctagagcagttgaagacatctcttcatcgaggactaacccctacagttatgcaatgagtactgaagaagccagatttcttacctaccatatgtggccattaacttttttgtcaccatcagaattggcaagagctggtttttattatataggacctggagatagggtagcctgctttgcctgtggtgggaagctcagtaactgggaaccaaaggatgatgctatgtcagaacaccggaggcattttcccaactgtccatttttggaaaattctctagaaactctgaggtttagcatttcaaatctgagcatgcagacacatgcagctcgaatgagaacatttatgtactggccatctagtgttccagttcagcctgagcagcttgcaagtgctggtttttattatgtgggtcgcaatgatgatgtcaaatgcttttgttgtgatggtggcttgaggtgttgggaatctggagatgatccatgggtagaacatgccaagtggtttccaaggtgtgagttcttgatacgaatgaaaggccaagagtttgttgatgagattcaaggtagatatcctcatcttcttgaacagctgttgtcaacttcagataccactggagaagaaaatgctgacccaccaattattcattttggacctggagaaagttcttcagaagatgctgtcatgatgaatacacctgtggttaaatctgccttggaaatgggctttaatagagacctggtgaaacaaacagttcaaagtaaaatcctgacaactggagagaactataaaacagttaatgatattgtgtcagcacttctaaatgctgaagatgaaaaaagagaggaggagaaggaaaaacaagctgaagaaatggcatcagatgatttgtcattaattcggaagaacagaatggctctctttcaacaattgacatgtgtgcttcctatcctggataatcttttaaaggccaatgtaattaataaacaggaacatgatattattaaacaaaaaacacagatacctttacaagcgagagaactgattgataccattttggttaaaggaaatgctgcggccaacatcttcaaaaactgtctaaaagaaattgactctacattgtataagaacttatttgtggataagaatatgaagtatattccaacagaagatgtttcaggtctgtcactggaagaacaattgaggaggttgcaagaagaacgaacttgtaaagtgtgtatggacaaagaagtttctgttgtatttattccttgtggtcatctggtagtatgccaggaatgtgccccttctctaagaaaatgccctatttgcaggggtataatcaagggtactgttcgtacatttctctcttaaagaaaaatagtctatattttaacctgcataaaaaggtctttaaaatattgttgaacacttgaagccatctaaagtaaaaagggaattatgagtttttcaattagtaacattcatgttctagtctgctttggtactaataatcttgtttctgaaaagatggtatcatatatttaatcttaatctgtttatttacaagggaagatttatgtttggtgaactatattagtatgtatgtgtacctaagggagtagtgtcactgcttgttatgcatcatttcaggagttactggatttgttgttctttcagaaagctttgaatactaaattatagtgtagaaaagaactggaaaccaggaactctggagttcatcagagttatggtgccgaattgtctttggtgcttttcacttgtgttttaaaataaggatttttctcttatttctccccctagtttgtgagaaacatctcaataaagtgcttt

SEQ ID NO: 200 - protein, 618 aa, Homo sapiens
MHKTASQRLFPGPSYQNIKSIMEDSTILSDWTNSNKQKMKYDFSCELYRMSTYSTFPAGVPVSERSLARAGFYYTGVNDKVKCFCCGLMLDNWKLGDSPIQKHKQLYPSCSFIQNLVSASLGSTSKNTSPMRNSFAHSLSPTLEHSSLFSGSYSSLSPNPLNSRAVEDISSSRTNPYSYAMSTEEARFLTYHMWPLTFLSPSELARAGFYYIGPGDRVACFACGGKLSNWEPKDDAMSEHRRHFPNCPFLENSLETLRFSISNLSMQTHAARMRTFMYWPSSVPVQPEQLASAGFYYVGRNDDVKCFCCDGGLRCWESGDDPWVEHAKWFPRCEFLIRMKGQEFVDEIQGRYPHLLEQLLSTSDTTGEENADPPIIHFGPGESSSEDAVMMNTPVVKSALEMGFNRDLVKQTVQSKILTTGENYKTVNDIVSALLNAEDEKREEEKEKQAEEMASDDLSLIRKNRMALFQQLTCVLPILDNLLKANVINKQEHDIIKQKTQIPLQARELIDTILVKGNAAANIFKNCLKEIDSTLYKNLFVDKNMKYIPTEDVSGLSLEEQLRRLQEERTCKVCMDKEVSVVFIPCGHLVVCQECAPSLRKCPICRGIIKGTVRTFLS

SEQ ID NO: 201 - DNA, 2477 bp, Homo sapiens
agtgcagacgcggctcctagcggatgggtgctattgtgaggcggttgtagaagttaataaaggtatccatggagaacactgaaaactcagtggattcaaaatccattaaaaatttggaaccaaagatcatacatggaagcgaatcaatggactctggaatatccctggacaacagttataaaatggattatcctgagatgggtttatgtataataattaataataagaattttcataaaagcactggaatgacatctcggtctggtacagatgtcgatgcagcaaacctcagggaaacattcagaaacttgaaatatgaagtcaggaataaaaatgatcttacacgtgaagaaattgtggaattgatgcgtgatgtttctaaagaagatcacagcaaaaggagcagttttgtttgtgtgcttctgagccatggtgaagaaggaataatttttggaacaaatggacctgttgacctgaaaaaaataacaaactttttcagaggggatcgttgtagaagtctaactggaaaacccaaacttttcattattcaggcctgccgtggtacagaactggactgtggcattgagacagacagtggtgttgatgatgacatggcgtgtcataaaataccagtggaggccgacttcttgtatgcatactccacagcacctggttattattcttggcgaaattcaaaggatggctcctggttcatccagtcgctttgtgccatgctgaaacagtatgccgacaagcttgaatttatgcacattcttacccgggttaaccgaaaggtggcaacagaatttgagtccttttcctttgacgctacttttcatgcaaagaaacagattccatgtattgtttccatgctcacaaaagaactctatttttatcactaaagaaatggttggttggtggttttttttagtttgtatgccaagtgagaagatggtatatttggtactgtatttccctctcattttgacctactctcatgctgcagagggtactttaagacatactccttccatcaaatagaaccactatgaagctacctcaaacttccagtcaggtagttgcaattgaattaaattaggaataaataaaaatggatactggtgcagtcattatgagaggcaatgattgttaatttacagctttcatgattagcaagttacagtgatgctgtgctatgaattttcaagtaattgtgaaaaagttaaacattgaagtaatgaatttttatgatattccccccacttaagactgtgtattctagttttgtcaaactgtagaaatgatgatgtggaagaacttaggcatctgtgggcatggtcaaaggctcaaacctttattttagaattgatatacacggatgacttaactgcatttttagaccatttatctgggattatggttttgtgatgtttgtcctgaacacttttgttgtaaaaaaataataataatgtttaatattgagaaagaaactaatattttatgtgagagaaagtgtgagcaaactaacttgacttttaaggctaaaacttaacattcatagaggggtggagttttaactgtaaggtgctacaatgcccctggatctaccagcataaatatcttctgatttgtccctatgcatatcagttgagcttcatataccagcaatatatctgaagagctattatataaaaaccccaaactgttgattattagccaggtaatgtgaataaattctataggaacatatgaaaatacaacttaaataataaacagtggaatataaggaaagcaataaatgaatgggctgagctgcctgtaacttgagagtagatggtttgagcctgagcagagacatgactcagcctgttccatgaaggcagagccatggaccacgcaggaagggcctacagcccatttctccatacgcactggtatgtgtggatgatgctgccagggcgccatcgccaagtaagaaagtgaagcaaatcagaaacttgtgaagtggaaatgttctaaaggtggtgaggcaataaaaatcatagtactctttgtagcaaaattcttaagtatgttattttctgttgaagtttacaatcaaaggaaaatagtaatgttttatactgtttactgaaagaaaaagacctatgagcacataggactctagacggcatccagccggaggccagagctgagccctcagcccgggaggcaggctccaggcctcagcaggtgcggagccgtcactgcaccaagtctcactggctgtcagtatgacatttcacgggagatttcttgttgctcaaaaaatgagctcgcatttgtcaatgacagtttcttttttcttactagacctgtaacttttgtaaatacacatagcatgtaatggtatcttaaagtgtgtttctatgtgacaattttgtacaaatttgttattttccatttttatttcaaaatatacattcaaacttaaaatt

SEQ ID NO: 202 - protein, 277 aa, Homo sapiens
MENTENSVDSKSIKNLEPKIIHGSESMDSGISLDNSYKMDYPEMGLCIIINNKNFHKSTGMTSRSGTDVDAANLRETFRNLKYEVRNKNDLTREEIVELMRDVSKEDHSKRSSFVCVLLSHGEEGIIFGTNGPVDLKKITNFFRGDRCRSLTGKPKLFIIQACRGTELDCGIETDSGVDDDMACHKIPVEADFLYAYSTAPGYYSWRNSKDGSWFIQSLCAMLKQYADKLEFMHILTRVNRKVATEFESFSFDATFHAKKQIPCIVSMLTKELYFYH

SEQ ID NO: 203 - DNA, 1906 bp, Homo sapiens
agaggaaagggaaggaggaggtcccgaatagcggtcgccgaaatgttccggtgtggaggcctggcggcgggtgctttgaagcagaagctggtgcccttggtgcggaccgtgtgcgtccgaagcccgaggcagaggaaccggctcccaggcaacttgttccagcgatggcatgttcctctagaactccagatgacaagacaaatggctagctctggtgcatcagggggcaaaatcgataattctgtgttagtccttattgtgggcttatcaacagtaggagctggtgcctatgcctacaagactatgaaagaggacgaaaaaagatacaatgaaagaatttcagggttagggctgacaccagaacagaaacagaaaaaggccgcgttatctgcttcagaaggagaggaagttcctcaagacaaggcgccaagtcatgttcctttcctgctaattggtggaggcacagctgcttttgctgcagccagatccatccgggctcgggatcctggggccagggtactgattgtatctgaagatcctgagctgccgtacatgcgacctcctctttcaaaagaactgtggttttcagatgacccaaatgtcacaaagacactgcgattcaaacagtggaatggaaaagagagaagcatatatttccagccaccttctttctatgtctctgctcaggacctgcctcatattgagaatggtggtgtggctgtcctcactgggaagaaggtagtacagctggatgtgagagacaacatggtgaaacttaatgatggctctcaaataacctatgaaaagtgcttgattgcaacaggaggtactccaagaagtctgtctgccattgatagggctggagcagaggtgaagagtagaacaacgcttttcagaaagattggagactttagaagcttggagaagatttcacgggaagtcaaatcaattacgattatcggtgggggcttccttggtagcgaactggcctgtgctcttggcagaaaggctcgagccttgggcacagaagtgattcaactcttccccgagaaaggaaatatgggaaagatcctccccgaatacctcagcaactggaccatggaaaaagtcagacgagagggggttaaggtgatgcccaatgctattgtgcaatccgttggagtcagcagtggcaagttacttatcaagctgaaagacggcaggaaggtagaaactgaccacatagtggcagctgtgggcctggagcccaatgttgagttggccaagactggtggcctggaaatagactcagattttggtggcttccgggtaaatgcagagctacaagcacgctctaacatctgggtggcaggagatgctgcatgcttctacgatataaagttgggaaggaggcgggtagagcaccatgatcacgctgttgtgagtggaagattggctggagaaaatatgactggagctgctaagccgtactggcatcagtcaatgttctggagtgatttgggccccgatgttggctatgaagctattggtcttgtggacagtagtttgcccacagttggtgtttttgcaaaagcaactgcacaagacaaccccaaatctgccacagagcagtcaggaactggtatccgatcagagagtgagacagagtccgaggcctcagaaattactattcctcccagcaccccggcagttccacaggctcccgtccagggggaggactacggcaaaggtgtcatcttctacctcagggacaaagtggtcgtggggattgtgctatggaacatctttaaccgaatgccaatagcaaggaagatcattaaggacggtgagcagcatgaagatctcaatgaagtagccaaactattcaacattcatgaagactgaagccccacagtggaattggcaa

SEQ ID NO: 204 - protein, 613 aa, Homo sapiens
MFRCGGLAAGALKQKLVPLVRTVCVRSPRQRNRLPGNLFQRWHVPLELQMTRQMASSGASGGKIDNSVLVLIVGLSTVGAGAYAYKTMKEDEKRYNERISGLGLTPEQKQKKAALSASEGEEVPQDKAPSHVPFLLIGGGTAAFAAARSIRARDPGARVLIVSEDPELPYMRPPLSKELWFSDDPNVTKTLRFKQWNGKERSIYFQPPSFYVSAQDLPHIENGGVAVLTGKKVVQLDVRDNMVKLNDGSQITYEKCLIATGGTPRSLSAIDRAGAEVKSRTTLFRKIGDFRSLEKISREVKSITIIGGGFLGSELACALGRKARALGTEVIQLFPEKGNMGKILPEYLSNWTMEKVRREGVKVMPNAIVQSVGVSSGKLLIKLKDGRKVETDHIVAAVGLEPNVELAKTGGLEIDSDFGGFRVNAELQARSNIWVAGDAACFYDIKLGRRRVEHHDHAVVSGRLAGENMTGAAKPYWHQSMFWSDLGPDVGYEAIGLVDSSLPTVGVFAKATAQDNPKSATEQSGTGIRSESETESEASEITIPPSTPAVPQAPVQGEDYGKGVIFYLRDKVVVGIVLWNIFNRMPIARKIIKDGEQHEDLNEVAKLFNIHED

SEQ ID NO: 205 - DNA, 1090 bp, Homo sapiens
atggccgctgacaggggacgcaggatattgggagtgtgtggcatgcatcctcatcatcaggaaactctaaaaaagaaccgagtggtgctagccaaacagctgttgttgagcgaattgttagaacatcttctggagaaggacatcatcaccttggaaatgagggagctcatccaggccaaagtgggcagtttcagccagaatgtggaactcctcaacttgctgcctaagaggggtccccaagcttttgatgccttctgtgaagccttgcactcctgaattttatcaaacacacttccagctggcatataggttgcagtctcggcctcgtggcctagcactggtgttgagcaatgtgcacttcactggagagaaagaactggaatttcgctctggaggggatgtggaccacagtactctagtcaccctcttcaagcttttgggctatgacgtccatgttctatgtgaccagactgcacaggaaatgcaagagaaactgcagaattttgcacagttacctgcacaccgagtcacggactgctgcatcgtggcactcctctcgcatggtgtggagggcgccatctatggtgtggatgggaaactgctccagctccaagaggtttttcagctctttgacaacgccaaccgcccaagcctacagaacaaaccaaaaatgttcttcatccaggcctgccgtggagatgagactaatcgtggggttgaccaacaagatggaaagaaccacgcaggatcccctgggtgcgaggagagtgatgccggtaaagaaaagttgccgaagatgagactgcccacgcgctcagacatgatatgcggctatgcctgcctcaaagggactgccgccatgcggaacaccaaacgaggttcctggtacatcgaggctcttgctcaagtgttttctgagcgggcttgtgatatgcacgtggccgacatgctggttaaggtgaacgcacttatcaaggatcgggaaggttatgctcctggcacagaattccaccggtgcaaggagatgtctgaatactgcagcactctgtgccgccacctctacctgttcccaggacaccctcccacatga

SEQ ID NO: 206 - protein, 91 aa, Homo sapiens
MAADRGRRILGVCGMHPHHQETLKKNRVVLAKQLLLSELLEHLLEKDIITLEMRELIQAKVGSFSQNVELLNLLPKRGPQAFDAFCEALHS

SEQ ID NO: 207 - DNA, 714 bp, Artificial sequence
  Human IgG1 (hinge, CH2 & CH3)
tctgatcaggagcccaaatcttgtgacaaaactcacacatgcccaccgtgcccagcacctgaactcctggggggaccgtcagtcttcctcttccccccaaaacccaaggacaccctcatgatctcccggacccctgaggtcacatgcgtggtggtggacgtgagccacgaagaccctgaggtcaagttcaactggtacgtggacggcgtggaggtgcataatgccaagacaaagccgcgggaggagcagtacaacagcacgtaccgtgtggtcagcgtcctcaccgtcctgcaccaggactggctgaatggcaaggagtacaagtgcaaggtctccaacaaagccctcccagcccccatcgagaaaacaatctccaaagccaaagggcagccccgagaaccacaggtgtacaccctgcccccatcccgggatgagctgaccaagaaccaggtcagcctgacctgcctggtcaaaggcttctatcccagcgacatcgccgtggagtgggagagcaatgggcagccggagaacaactacaagaccacgcctcccgtgctggactccgacggctccttcttcctctacagcaagctcaccgtggacaagagcaggtggcagcaggggaacgtcttctcatgctccgtgatgcatgaggctctgcacaaccactacacgcagaagagcctctccctgtctccgggtaaatgatctaga

SEQ ID NO: 208 - protein, 235 aa, Artificial sequence
  Human IgG1 (hinge, CH2 & CH3 domains)
SDQEPKSCDKTHTCPPCPAPELLGGPSVFLFPPKPKDTLMISRTPEVTCVVVDVSHEDPEVKFNWYVDGVEVHNAKTKPREEQYNSTYRVVSVLTVLHQDWLNGKEYKCKVSNKALPAPIEKTISKAKGQPREPQVYTLPPSRDELTKNQVSLTCLVKGFYPSDIAVEWESNGQPENNYKTTPPVLDSDGSFFLYSKLTVDKSRWQQGNVFSCSVMHEALHNHYTQKSLSLSPGK

SEQ ID NO: 209 - DNA, 718 bp, Artificial sequence
  Fusion polynucleotide
  misc_feature (34)..(34): n = A, T, C or G
  misc_feature (43)..(43): n = A, T, C or G
  misc_feature (52)..(52): n = A, T, C or G
  misc_feature (55)..(55): n = A, T, C or G
  misc_feature (58)..(58): n = A, T, C or G
  misc_feature (64)..(64): n = A, T, C or G
tgatcaagaaccacatggaggatgcacgtgcccncagtgcccncaatgcccngcnccngaactnccaggaggcccttctgtctttgtcttccccccgaaacccaaggacgtcctctccatttttggaggccgagtcacgtgcgttgtagtggacgtcggaaagaaagaccccgaggtcaatttcaactggtatattgatggcgttgaggtgcgaacggccaatacgaagccaaaagaggaacagttcaacagcacgtaccgcgtggtcagcgtcctgcccatccagcaccaggactggctgacggggaaggaattcaagtgcaaggtcaacaacaaagctctcccggcccccatcgagaggaccatctccaaggccaaagggcagacccgggagccgcaggtgtacaccctggccccacaccgggaagaactggccaaggacaccgtgagcgtaacatgcctggtcaaaggcttctacccagctgacatcaacgttgagtggcagaggaacggtcagccggagtcagagggcacctacgccaacacgccgccacagctggacaacgacgggacctacttcctctacagcaagctctcggtgggaaagaacacgtggcagcggggagaaaccttaacctgtgtggtgatgcatgaggccctgcacaaccactacacccagaaatccatcacccagtcttcgggtaaatagtaatctaga

SEQ ID NO: 210 - DNA, 757 bp, Artificial sequence
  Fusion polynucleotide
tgatcaagaacccaagacaccaaaaccacaaccacaaccacaaccacaacccaatcctacaacagaatccaagtgtcccaaatgtccagcccctgagctcctgggagggccctcagtcttcatcttccccccgaaacccaaggacgtcctctccatttctgggaggcccgaggtcacgtgcgttgtggtagacgtgggccaggaagaccccgaggtcagtttcaactggtacattgatggcgctgaggtgcgaacggccaacacgaggccaaaagaggaacagttcaacagcacgtaccgcgtggtcagcgtcctgcccatccagcaccaggactggctgacggggaaggaattcaagtgcaaggtcaacaacaaagctctcccggcccccatcgagaagaccatctccaaggccaaagggcagacccgggagccgcaggtgtacaccctggccccacaccgggaagagctggccaaggacaccgtgagcgtaacatgcctggtcaaaggcttctacccacctgatatcaacgttgagtggcagaggaatgggcagccggagtcagagggcacytacgccaccacgccaccccagctggacaacgacgggacctacttcctctacagcaagctctcggtgggaaagaacacgtggcagcagggagaaaccttcacctgtgtggtgatgcacgaggccctgcacaaccactacacccagaaatccatcacccagtcttcgggtaaatagtaatctaga

SEQ ID NO: 211 - DNA, 727 bp, Artificial sequence
  Fusion polynucleotide
tgatcaagcgcaccacagcgaagaccccagctccaagtgtcccaaatgcccaggccctgaactccttggagggcccacggtcttcatcttccccccgaaagccaaggacgtcctctccatcacccgaaaacctgaggtcacgtgcttgtggtggacgtgggtaaagaagaccctgagatcgagttcaagctggtccgtggatgacacagaggtacacacggctgagacaaagccaaaggaggaacagttcaacagcacgtaccgcgtggtcagcgtcctgcccatccagcaccaggactggctgacggggaaggaattcaagtgcaaggtcaacaacaaagctctcccagcccccatcgagaggaccatctccaaggccaaagggcagacccgggagccgcaggtgtacaccctggccccacaccgggaagagctggccaaggacaccgtgagcgtaacctgcctggtcaaaggcttcttcccagctgacatcaacgttgagtggcagaggaatgggcagccggagtcagagggcacctacgccaacacgccgccacagctggacaacgacgggacctacttcctctacagcaaactctccgtgggaaagaacacgtggcagcagggagaagtcttcacctgtgtggtgatgcacgaggctctacacaatcactccacccagaaatccatcacccagtcttcgggtaaatagtaatctagagggccc

SEQ ID NO: 212 - protein, 231 aa, Artificial sequence
  Fusion polypeptide
EPHGGCTCPQCPAPELPGGPSVFVFPPKPKDVLSISGRPEVTCVVVDVGKEDPEVNFNWYIDGVEVRTANTKPKEEQFNSTYRVVSVLPIQHQDWLTGKEFKCKVNNKALPAPIERTISKAKGQTREPQVYTLAPHREELAKDTVSVTCLVKGFYPADINVEWQRNGQPESEGTYANTPPQLDNDGTYFLYSRLSVGKNTWQRGETLTGVVMHEALHNHYTQKSITQSSGK

SEQ ID NO: 213 - protein, 248 aa, Artificial sequence
  Fusion polypeptide
DQEPKTPKPQPQPQPQPNPTTESKCPKCPAPELLGGPSVFIFPPKPKDVLSISGRPEVTCVVVDVGQEDPEVSFNWYIDGAEVRTANTRPKEEQFNSTYRVVSVLPIQHQDWLTGKEFKCKVNNKALPAPIEKTISKAKGQTREPQVYTLAPHREELAKDTVSVTCLVKGFYPPDINVEWQRNGQPESEGTYATTPPQLDNDGTYFLYSKLSVGKNTWQQGETFTCVVMHEALHNHYTQKSITQSSGK

SEQ ID NO: 214 - protein, 236 aa, Artificial sequence
  Fusion polypeptide
DQAHHSEDPSSKCPKCPGPELLGGPTVFIFPPKAKDVLSITRKPEVTCLWWTWVKKTLRSSSSWSVDDTEVHTAETKPKEEQFNSTYRVVSVLPIQHQDWLTGKEFKCKVNNKALPAPIERTISKAKGQTREPQVYTLAPHREELAKDTVSVTCLVKGFFPADINVEWQRNGQPESEGTYANTPPQLDNDGTYFLYSKLSVGKNTWQQGEVFTCVVMHEALHNHSTQKSITQSSGK

SEQ ID NO: 215 - DNA, 54 bp, Artificial sequence
  Fusion polynucleotide
gatcaggagcccaaatcttgtgacaaaactcacacatgcccaccgtgcccagca

SEQ ID NO: 216 - protein, 18 aa, Artificial sequence
  Fusion polypeptide
DQEPKSCDKTHTCPPCPA

SEQ ID NO: 217 - DNA, 54 bp, Artificial sequence
  Fusion polynucleotide
gatctggagcccaaatcttgtgacaaaactcacacatgcccaccgtgcccagca

SEQ ID NO: 218 - protein, 18 aa, Artificial sequence
  Fusion polypeptide
DLEPKSCDKTHTCPPCPA

SEQ ID NO: 219 - DNA, 327 bp, Artificial sequence
  Fusion polynucleotide
cctgaactcctggggggaccgtcagtcttcctcttccccccaaaacccaaggacaccctcatgatctcccggacccctgaggtcacatgcgtggtggtggacgtgagccacgaagaccctgaggtcaagttcaactggtacgtggacggcgtggaggtgcataatgccaagacaaagccgcgggaggagcagtacaacagcacgtaccgtgtggtcagcgtcctcaccgtcctgcaccaggactggctgaatggcaaggagtacaagtgcaaggtctccaacaaagccctcccagcccccatcgagaaaaccatctccaaagccaaa

SEQ ID NO: 220 - protein, 109 aa, Artificial sequence
  Fusion polypeptide
PELLGGPSVFLFPPKPKDTLMISRTPEVTCVVVDVSHEDPEVKFNWYVDGVEVHNAKTKPREEQYNSTYRVVSVLTVLHQDWLNGKEYKCKVSNKALPAPIEKTISKAK

SEQ ID NO: 221 - DNA, 324 bp, Artificial sequence
  Fusion polynucleotide
gggcagccccgagaaccacaggtgtacaccctgcccccatcccgggaggagatgaccaagaaccaggtcagcctgacctgcctggtcaaaggcttctatcccagcgacatcgccgtggagtgggagagcaatgggcagccggagaacaactacaagaccacgcctcccgtgctggactccgacggctccttcttcctctatagcaagctcaccgtggacaagagcaggtggcagcaggggaacgtcttctcatgctccgtgatgcatgaggctctgcacaaccactacacgcagaagagcctctccctgtccccgggtaaatga

SEQ ID NO: 222 - protein, 107 aa, Artificial sequence
  Fusion polypeptide
GQPREPQVYTLPPSREEMTKNQVSLTCLVKGFYPSDIAVEWESNGQPENNYKTTPPVLDSDGSFFLYSKLTVDKSRWQQGNVFSCSVMHEALHNHYTQKSLSLSPGK

SEQ ID NO: 223 - DNA, 54 bp, Artificial sequence
  Fusion polynucleotide
gatcaggagcccaaatcttctgacaaaactcacacatccccaccgtccccagca

SEQ ID NO: 224 - protein, 18 aa, Artificial sequence
  Fusion polypeptide
DQEPKSSDKTHTSPPSPA

SEQ ID NO: 225 - DNA, 712 bp, Artificial sequence
  Fusion polynucleotide
tgatcaccccaaatcttctgacaaaactcacacatctccaccgtcctcagcacctgaactcctgggtggaccgtcagtcttcctcttccccccaaaacccaaggacaccctcatgatctcccggacccctgaggtcacatgcgtggtggtggacgtgagccacgaagaccctgaggtcaagttcaactggtacgtggacggcgtggaggtgcataatgccaagacaaagccgcgggaggagcagtacaacagcacgtaccgtgtggtcagcgtcctcaccgtcctgcaccaggactggctgaatggcaaggagtacaagtgcaaggtctccaacaaagccctcccagcccccatcgagaaaacaatctccaaagccaaagggcagccccgagaaccacaggtgtacaccctgcccccatcccgggatgagctgaccaagaaccaggtcagcctgacctgcctggtcaaaggcttctatcccagcgacatcgccgtggagtgggagagcaatgggcagccggagaacaactacaagaccacgcctcccgtgctggactccgacggctccttcttcctctacagcaagctcaccgtggacaagagcaggtggcagcaggggaacgtcttctcatgctccgtgatgcatgaggctctgcacaaccactacacgcagaagagcctctccctgtctccgggtaaatgataatctaga

SEQ ID NO: 226 - protein, 233 aa, Artificial sequence
  Fusion polypeptide
DHPKSSDKTHTSPPSSAPELLGGPSVFLFPPKPKDTLMISRTPEVTCVVVDVSHEDPEVKFNWYVDGVEVHNAKTKPREEQYNSTYRVVSVLTVLHQDWLNGKEYKCKVSNKALPAPIEKTISKAKGQPREPQVYTLPPSRDELTKNQVSLTCLVKGFYPSDIAVEWESNGQPENNYKTTPPVLDSDGSFFLYSKLTVDKSRWQQGNVFSCSVMHEALHNHYTQKSLSLSPGK

SEQ ID NO: 227 - DNA, 35 bp, Artificial sequence
  5' primer for llama IgG1 constant region
gttgttgatcaagaaccacatggaggatgcacgtg

SEQ ID NO: 228 - DNA, 32 bp, Artificial sequence
  5' primer for llama IgG2 constant region
gttgttgatcaagaacccaagacaccaaaacc

SEQ ID NO: 229 - DNA, 33 bp, Artificial sequence
  5' primer for llama IgG3 constant region
gttgttgatcaagcgcaccacagcgaagacccc

SEQ ID NO: 230 - DNA, 19 bp, Artificial sequence
  Llama Fc sense sequencing primer
ctgagatcgagttcagctg

SEQ ID NO: 231 - DNA, 19 bp, Artificial sequence
  Llama Fc antisense sequencing primer
cctcctttggctttgtctc

SEQ ID NO: 232 - DNA, 1527 bp, Artificial sequence
  Fusion polynucleotide
  misc_feature (843)..(843): n is a, c, g, or t
  misc_feature (852)..(852): n is a, c, g, or t
  misc_feature (861)..(861): n is a, c, g, or t
  misc_feature (864)..(864): n is a, c, g, or t
  misc_feature (867)..(867): n is a, c, g, or t
  misc_feature (873)..(873): n is a, c, g, or t
aagcttgccgccatggattttcaagtgcagattttcagcttcctgctaatcagtgcttcagtcataattgccagaggacaaattgttctctcccagtctccagcaatcctgtctgcatctccaggggagaaggtcacaatgacttgcagggccagctcaagtgtaagttacatgcactggtaccagcagaagccaggatcctcccccaaaccctggatttatgccccatccaacctggcttctggagtccctgctcgcttcagtggcagtgggtctgggacctcttactctctcacaatcagcagagtggaggctgaagatgctgccacttattactgccagcagtggagttttaacccacccacgttcggtgctgggaccaagctggagctgaaagatggcggtggctcgggcggtggtggatctggaggaggtgggagctctcaggcttatctacagcagtctggggctgagctggtgaggcctggggcctcagtgaagatgtcctgcaaggcttctggctacacatttaccagttacaatatgcactgggtaaagcagacacctagacagggcctggaatggattggagctatttatccaggaaatggtgatacttcctacaatcagaagttcaagggcaaggccacactgactgtagacaaatcctccagcacagcctacatgcagctcagcagcctgacatctgaagactctgcggtctatttctgtgcaagagtggtgtactatagtaactcttactggtacttcgatgtctggggcacagggaccacggtcaccgtctcttctgatcaagaaccacatggaggatgcacgtgcccncagtgcccncaatgcccngcnccngaactnccaggaggcccttctgtctttgtcttccccccgaaacccaaggacgtcctctccatttttggaggccgagtcacgtgcgttgtagtggacgtcggaaagaaagaccccgaggtcaatttcaactggtatattgatggcgttgaggtgcgaacggccaatacgaagccaaaagaggaacagttcaacagcacgtaccgcgtggtcagcgtcctgcccatccagcaccaggactggctgacggggaaggaattcaagtgcaaggtcaacaacaaagctctcccggcccccatcgagaggaccatctccaaggccaaagggcagacccgggagccgcaggtgtacaccctggccccacaccgggaagaactggccaaggacaccgtgagcgtaacatgcctggtcaaaggcttctacccagctgacatcaacgttgagtggcagaggaacggtcagccggagtcagagggcacctacgccaacacgccgccacagctggacaacgacgggacctacttcctctacagcaagctctcggtgggaaagaacacgtggcagcggggagaaaccttaacctgtgtggtgatgcatgaggccctgcacaaccactacacccagaaatccatcacccagtcttcgggtaaatagtaatctaga

SEQ ID NO: 233 - DNA, 1566 bp, Artificial sequence
  Fusion polynucleotide
aagcttgccgccatggattttcaagtgcagattttcagcttcctgctaatcagtgcttcagtcataattgccagaggacaaattgttctctcccagtctccagcaatcctgtctgcatctccaggggagaaggtcacaatgacttgcagggccagctcaagtgtaagttacatgcactggtaccagcagaagccaggatcctcccccaaaccctggatttatgccccatccaacctggcttctggagtccctgctcgcttcagtggcagtgggtctgggacctcttactctctcacaatcagcagagtggaggctgaagatgctgccacttattactgccagcagtggagttttaacccacccacgttcggtgctgggaccaagctggagctgaaagatggcggtggctcgggcggtggtggatctggaggaggtgggagctctcaggcttatctacagcagtctggggctgagctggtgaggcctggggcctcagtgaagatgtcctgcaaggcttctggctacacatttaccagttacaatatgcactgggtaaagcagacacctagacagggcctggaatggattggagctatttatccaggaaatggtgatacttcctacaatcagaagttcaagggcaaggccacactgactgtagacaaatcctccagcacagcctacatgcagctcagcagcctgacatctgaagactctgcggtctatttctgtgcaagagtggtgtactatagtaactcttactggtacttcgatgtctggggcacagggaccacggtcaccgtctcttctgatcaagaacccaagacaccaaaaccacaaccacaaccacaaccacaacccaatcctacaacagaatccaagtgtcccaaatgtccagcccctgagctcctgggagggccctcagtcttcatcttccccccgaaacccaaggacgtcctctccatttctgggaggcccgaggtcacgtgcgttgtggtagacgtgggccaggaagaccccgaggtcagtttcaactggtacattgatggcgctgaggtgcgaacggccaacacgaggccaaaagaggaacagttcaacagcacgtaccgcgtggtcagcgtcctgcccatccagcaccaggactggctgacggggaaggaattcaagtgcaaggtcaacaacaaagctctcccggcccccatcgagaagaccatctccaaggccaaagggcagacccgggagccgcaggtgtacaccctggccccacaccgggaagagctggccaaggacaccgtgagcgtaacatgcctggtcaaaggcttctacccacctgatatcaacgttgagtggcagaggaatgggcagccggagtcagagggcacytacgccaccacgccaccccagctggacaacgacgggacctacttcctctacagcaagctctcggtgggaaagaacacgtggcagcagggagaaaccttcacctgtgtggtgatgcacgaggccctgcacaaccactacacccagaaatccatcacccagtcttcgggtaaatagtaatctaga

SEQ ID NO: 234 - DNA, 1536 bp, Artificial sequence
  Fusion polynucleotide
aagcttgccgccatggattttcaagtgcagattttcagcttcctgctaatcagtgcttcagtcataattgccagaggacaaattgttctctcccagtctccagcaatcctgtctgcatctccaggggagaaggtcacaatgacttgcagggccagctcaagtgtaagttacatgcactggtaccagcagaagccaggatcctcccccaaaccctggatttatgccccatccaacctggcttctggagtccctgctcgcttcagtggcagtgggtctgggacctcttactctctcacaatcagcagagtggaggctgaagatgctgccacttattactgccagcagtggagttttaacccacccacgttcggtgctgggaccaagctggagctgaaagatggcggtggctcgggcggtggtggatctggaggaggtgggagctctcaggcttatctacagcagtctggggctgagctggtgaggcctggggcctcagtgaagatgtcctgcaaggcttctggctacacatttaccagttacaatatgcactgggtaaagcagacacctagacagggcctggaatggattggagctatttatccaggaaatggtgatacttcctacaatcagaagttcaagggcaaggccacactgactgtagacaaatcctccagcacagcctacatgcagctcagcagcctgacatctgaagactctgcggtctatttctgtgcaagagtggtgtactatagtaactcttactggtacttcgatgtctggggcacagggaccacggtcaccgtctcttctgatcaagcgaaccacagcgaagaccccagctccaagtgtcccaaatgcccaggccctgaactccttggagggcccacggtcttcatcttccccccgaaagccaaggacgtcctctccatcacccgaaaacctgaggtcacgtgcttgtggtggacgtgggtaaagaagaccctgagatcgagttcaagctggtccgtggatgacacagaggtacacacggctgagacaaagccaaaggaggaacagttcaacagcacgtaccgcgtggtcagcgtcctgcccatccagcaccaggactggctgacggggaaggaattcaagtgcaaggtcaacaacaaagctctcccagcccccatcgagaggaccatctccaaggccaaagggcagacccgggagccgcaggtgtacaccctggccccacaccgggaagagctggccaaggacaccgtgagcgtaacctgcctggtcaaaggcttcttcccagctgacatcaacgttgagtggcagaggaatgggcagccggagtcagagggcacctacgccaacacgccgccacagctggacaacgacgggacctacttcctctacagcaaactctccgtgggaaagaacacgtggcagcagggagaagtcttcacctgtgtggtgatgcacgaggctctacacaatcactccacccagaaatccatcacccagtcttcgggtaaatagtaatctagagggccc

SEQ ID NO: 235 - protein, 498 aa, Artificial sequence
  Fusion polypeptide
MDFQVQIFSFLLISASVIIARGQIVLSQSPAILSASPGEKVTMTCRASSSVSYMHWYQQKPGSSPKPWIYAPSNLASGVPARFSGSGSGTSYSLTISRVEAEDAATYYCQQWSFNPPTFGAGTKLELKDGGGSGGGGSGGGGSSQAYLQQSGAELVRPGASVKMSCKASGYTFTSYNMHWVKQTPRQGLEWIGAIYPGNGDTSYNQKFKGKATLTVDKSSSTAYMQLSSLTSEDSAVYFCARVVYYSNSYWYFDVWGTGTTVTVSSDQEPHGGCTCPQCPAPELPGGPSVFVFPPKPKDVLSIFGGRVTCVVVDVGKKDPEVNFNWYIDGVEVRTANTKPKEEQFNSTYRVVSVLPIQHQDWLTGKEFKCKVNNKALPAPIERTISKAKGQTREPQVYTLAPHREELAKDTVSVTCLVKGFYPADINVEWQRNGQPESEGTYANTPPQLDNDGTYFLYSKLSVGKNTWQRGETLTCVVMHEALHNHYTQKSITQSSGK

SEQ ID NO: 236 - protein, 514 aa, Artificial sequence
  Fusion polypeptide
MDFQVQIFSFLLISASVIIARGQIVLSQSPAILSASPGEKVTMTCRASSSVSYMHWYQQKPGSSPKPWIYAPSNLASGVPARFSGSGSGTSYSLTISRVEAEDAATYYCQQWSFNPPTFGAGTKLELKDGGGSGGGGSGGGGSSQAYLQQSGAELVRPGASVKMSCKASGYTFTSYNMHWVKQTPRQGLEWIGAIYPGNGDTSYNQKFKGKATLTVDKSSSTAYMQLSSLTSEDSAVYFCARVVYYSNSYWYFDVWGTGTTVTVSSDQEPKTPKPQPQPQPQPNPTTESKCPKCPAPELLGGPSVFIFPPKPKDVLSISGRPEVTCVVVDVGQEDPEVSFNWYIDGAEVRTANTRPKEEQFNSTYRVVSVLPIQHQDWLTGKEFKCKVNNKALPAPIEKTISKAKGQTREPQVYTLAPHREELAKDTVSVTCLVKGFYPPDINVEWQRNGQPESEGTYATTPPQLDNDGTYFLYSKLSVGKNTWQQGETFTCVVMHEALHNHYTQKSITQSSGK

SEQ ID NO: 237 - protein, 503 aa, Artificial sequence
  Fusion polypeptide
MDFQVQIFSFLLISASVIIARGQIVLSQSPAILSASPGEKVTMTCRASSSVSYMHWYQQKPGSSPKPWIYAPSNLASGVPARFSGSGSGTSYSLTISRVEAEDAATYYCQQWSFNPPTFGAGTKLELKDGGGSGGGGSGGGGSSQAYLQQSGAELVRPGASVKMSCKASGYTFTSYNMHWVKQTPRQGLEWIGAIYPGNGDTSYNQKFKGKATLTVDKSSSTAYMQLSSLTSEDSAVYFCARVVYYSNSYWYFDVWGTGTTVTVSSDQAHSHSEDPSSKCPKCPGPELLGGPTVFIFPPKAKDVLSITRKPEVTCLWWTWVKKTLRSSSSWSVDDTEVHTAETKPKEEQFNSTYRVVSVLPIQHQDWLTGKEFKCKVNNKALPAPIERTISKAKGQTREPQVYTLAPHREELAKDTVSVTCLVKGFFPADINVEWQRNGQPESEGTYANTPPQLDNDGTYFLYSKLSVGKNTWQQGEVFTCVVMHEALHNHSTQKSITQSSGK

SEQ ID NO: 238 - DNA, 42 bp, Artificial sequence
  3'-primer for llama IgG1, IgG2, IgG3 constant region
gttgtttctagattactatttacccgaagactgggtgatgga

SEQ ID NO: 239 - DNA, 1521 bp, Artificial sequence
  Fusion polynucleotide
aagcttgccgccatggattttcaagtgcagattttcagcttcctgctaatcagtgcttcagtcataattgccagaggacaaattgttctctcccagtctccagcaatcctgtctgcatctccaggggagaaggtcacaatgacttgcagggccagctcaagtgtaagttacatgcactggtaccagcagaagccaggatcctcccccaaaccctggatttatgccccatccaacctggcttctggagtccctgctcgcttcagtggcagtgggtctgggacctcttactctctcacaatcagcagagtggaggctgaagatgctgccacttattactgccagcagtggagttttaacccacccacgttcggtgctgggaccaagctggagctgaaagatggcggtggctcgggcggtggtggatctggaggaggtgggagctctcaggcttatctacagcagtctggggctgagctggtgaggcctggggcctcagtgaagatgtcctgcaaggcttctggctacacatttaccagttacaatatgcactgggtaaagcagacacctagacagggcctggaatggattggagctatttatccaggaaatggtgatacttcctacaatcagaagttcaagggcaaggccacactgactgtagacaaatcctccagcacagcctacatgcagctcagcagcctgacatctgaagactctgcggtctatttctgtgcaagagtggtgtactatagtaactcttactggtacttcgatgtctggggcacagggaccacggtcaccgtctcttctgatcaggagcccaaatcttgtgacaaaactcacacatgcccaccgtgcccagcacctgaactcctggggggaccgtcagtcttcctcttccccccaaaacccaaggacaccctcatgatctcccggacccctgaggtcacatgcgtggtggtggacgtgagccacgaagaccctgaggtcaagttcaactggtacgtggacggcgtggaggtgcataatgccaagacaaagccgcgggaggagcagtacaacagcacgtaccgtgtggtcagcgtcctcaccgtcctgcaccaggactggctgaatggcaaggagtacaagtgcaaggtctccaacaaagccctcccagcccccatcgagaaaacaatctccaaagccaaagggcagccccgagaaccacaggtgtacaccctgcccccatcccgggatgagctgaccaagaaccaggtcagcctgacctgcctggtcaaaggcttctatcccagcgacatcgccgtggagtgggagagcaatgggcagccggagaacaactacaagaccacgcctcccgtgctggactccgacggctccttcttcctctacagcaagctcaccgtggacaagagcaggtggcagcaggggaacgtcttctcatgctccgtgatgcatgaggctctgcacaaccactacacgcagaagagcctctccctgtctccgggtaaatgatctaga

SEQ ID NO: 240 - protein, 500 aa, Artificial sequence
  Fusion polypeptide
MDFQVQIFSFLLISASVIIARGQIVLSQSPAILSASPGEKVTMTCRASSSVSYMHWYQQKPGSSPKPWIYAPSNLASGVPARFSGSGSGTSYSLTISRVEAEDAATYYCQQWSFNPPTFGAGTKLELKDGGGSGGGGSGGGGSSQAYLQQSGAELVRPGASVKMSCKASGYTFTSYNMHWVKQTPRQGLEWIGAIYPGNGDTSYNQKFKGKATLTVDKSSSTAYMQLSSLTSEDSAVYFCARVVYYSNSYWYFDVWGTGTTVTVSSDQEPKSCDKTHTCPPCPAPELLGGPSVFLFPPKPKDTLMISRTPEVTCVVVDVSHEDPEVKFNWYVDGVEVHNAKTKPREEQYNSTYRVVSVLTVLHQDWLNGKEYKCKVSNKALPAPIEKTISKAKGQPREPQVYTLPPSRDELTKNQVSLTCLVKGFYPSDIAVEWESNGQPENNYKTTPPVLDSDGSFFLYSKLTVDKSRWQQGNVFSCSVMHEALHNHYTQKSLSLSPGK

SEQ ID NO: 241 - DNA, 162 bp, Artificial sequence
  Transmembrane domain and cytoplasmic tail of human CD80
gcggatccttcgaacctgctcccatcctgggccattaccttaatctcagtaaatggaatttttgtgatatgctgcctgacctactgctttgccccaagatgcagagagagaaggaggaatgagagattgagaagggaaagtgtacgccctgtataaatcgat

SEQ ID NO: 242 - protein, 51 aa, Artificial sequence
  Transmembrane domain and cytoplasmic tail of human CD80
ADPSNLLPSWAITLISVNGIFVICCLTYCFAPRCRERRRNERLRRESVRPV

SEQ ID NO: 243 - DNA, 399 bp, Artificial sequence
  VL region nucleotide sequence of 40.2.220
aagcttatggattttcaagtgcagattttcagcttcctgctaatcagtgcttcagtcataatgtccagaggagtcgacattgttctgactcagtctccagccaccctgtctgtgactccaggagatagagtctctctttcctgcagggccagccagagtattagcgactacttacactggtatcaacaaaaatcacatgagtctccaaggcttctcatcaaatatgcttcccattccatctctgggatcccctccaggttcagtggcagtggatcagggtcagatttcactctcagtatcaacagtgtggaacctgaagatgttggaatttattactgtcaacatggtcacagctttccgtggacgttcggtggaggcaccaagctggaaatcaaacgg

SEQ ID NO: 244 - protein, 131 aa, Artificial sequence
  VL region pp sequence of 40.2.220
MDFQVQIFSFLLISASVIMSRGVDIVLTQSPATLSVTPGDRVSLSCRASQSISDYLHWYQQKSHESPRLLIKYASHSISGIPSRFSGSGSGSDFTLSINSVEPEDVGIYYCQHGHSFPWTFGGGTKLEIKR

SEQ ID NO: 245 - DNA, 368 bp, Artificial sequence
  VH region nucleotide sequence of 40.2.220
cagatccagttggtgcaatctggacctgagctgaagaagcctggagagacagtcaggatctcctgcaaggcttctgggtatgccttcacaactactggaatgcagtgggtgcaagagatgccaggaaagggtttgaagtggattggctggataaacaccccactctggagtgccaaaatatgtagaagacttcaaggacggtttgccttctctttggaaacctctgccaacactgcatatttacagataagcaacctcaaagatgaggacacggctacgtatttctgtgtgagatccgggaatggtaactatgacctggcctactttgcttactggggccaagggacactggtcactgtctctgatca

SEQ ID NO: 246 - protein, 121 aa, Artificial sequence
  VH region pp sequence of 40.2.220
QIQLVQSGPELKKPGETVRISCKASGYAFTTTGMQWVQEMPGKGLKWIGWINTPLWSAKICRRLQGRFAFSLETSANTAYLQISNLKDEDTATYFCVRSGNGNYDLAYFAYWGQGTLVTVS

SEQ ID NO: 247 - DNA, 812 bp, Artificial sequence
  40.2.220 scFv
aagcttatggattttcaagtgcagattttcagcttcctgctaatcagtgcttcagtcataatgtccagaggagtcgacattgttctgactcagtctccagccaccctgtctgtgactccaggagatagagtctctctttcctgcagggccagccagagtattagcgactacttacactggtatcaacaaaaatcacatgagtctccaaggcttctcatcaaatatgcttcccattccatctctgggatcccctccaggttcagtggcagtggatcagggtcagatttcactctcagtatcaacagtgtggaacctgaagatgttggaatttattactgtcaacatggtcacagctttccgtggacgttcggtggaggcaccaagctggaaatcaaacggggtggcggtggctcgggcggaggtgggtcgggtggcggcggatctcagatccagttggtgcaatctggacctgagctgaagaagcctggagagacagtcaggatctcctgcaaggcttctgggtatgccttcacaactactggaatgcagtgggtgcaagagatgccaggaaagggtttgaagtggattggctggataaacaccccactctggagtgccaaaatatgtagaagacttcaaggacggtttgccttctctttggaaacctctgccaacactgcatatttacagataagcaacctcaaagatgaggacacggctacgtatttctgtgtgagatccgggaatggtaactatgacctggcctactttgcttactggggccaagggacactggtcactgtctctgatca

SEQ ID NO: 248 - protein, 267 aa, Artificial sequence
  40.2.220 scFv
MDFQVQIFSFLLISASVIMSRGVDIVLTQSPATLSVTPGDRVSLSCRASQSISDYLHWYQQKSHESPRLLIKYASHSISGIPSRFSGSGSGSDFTLSINSVEPEDVGIYYCQHGHSFPWTFGGGTKLEIKRGGGGSGGGGSGGGGSQIQLVQSGPELKKPGETVRISCKASGYAFTTTGMQWVQEMPGKGLKWIGWINTPLWSAKICRRLQGRFAFSLETSANTAYLQISNLKDEDTATYFCVRSGNGNYDLAYFAYWGQGTLVTVS

SEQ ID NO: 249 - DNA, 405 bp, Artificial sequence
  VL region nucleotide sequence of 2E12
atggattttcaagtgcagattttcagcttcctgctaatcagtgcttcagtcataatgtccagaggagtcgacattgtgctcacccaatctccagcttctttggctgtgtctctaggtcagagagccaccatctcctgcagagccagtgaaagtgttgaatattatgtcacaagtttaatgcagtggtaccaacagaaaccaggacagccacccaaactcctcatctctgctgcatccaacgtagaatctggggtccctgccaggtttagtggcagtgggtctgggacagacttcagcctcaacatccatcctgtggaggaggatgatattgcaatgtatttctgtcagcaaagtaggaaggttccttggacgttcggtggaggcaccaagctggaaatcaaacgg

SEQ ID NO: 250 - protein, 135 aa, Artificial sequence
  VL region pp sequence of 2E12
MDFQVQIFSFLLISASVIMSRGVDIVLTQSPASLAVSLGQRATISCRASESVEYYVTSLMQWYQQKPGQPPKLLISAASNVESGVPARFSGSGSGTDFSLNIHPVEEDDIAMYFCQQSRKVPWTFGGGTKLEIKR

SEQ ID NO: 251 - DNA, 369 bp, Artificial sequence
  VH region nucleotide sequence of 2E12
caggtgcagctgaaggagtcaggacctggcctggtggcgccctcacagagcctgtccatcacatgcaccgtctcagggttctcattaaccggctatggtgtaaactgggttcgccagcctccaggaaagggtctggagtggctgggaatgatatggggtgatggaagcacagactataattcagctctcaaatccagactgagcatcaccaaggacaactccaagagccaagttttcttaaaaatgaacagtctgcaaactgatgacacagccagatactactgtgccagagatggttatagtaactttcattactatgttatggactactggggtcaaggaacctcagtcaccgtctcctcagatctg

SEQ ID NO: 252 - protein, 121 aa, Artificial sequence
  VH region pp sequence of 2E12
QVQLKESGPGLVAPSQSLSITCTVSGFSLTGYGVNWVRQPPGKGLEWLGMIWGDGSTDYNSALKSRLSITKDNSKSQVFLKMNSLQTDDTARYYCARDGYSNFHYYVMDYWGQGTSVTVSS

SEQ ID NO: 253 - DNA, 825 bp, Artificial sequence
  2e12 scFv
aagcttatggattttcaagtgcagattttcagcttcctgctaatcagtgcttcagtcataatgtccagaggagtcgacattgtgctcacccaatctccagcttctttggctgtgtctctaggtcagagagccaccatctcctgcagagccagtgaaagtgttgaatattatgtcacaagtttaatgcagtggtaccaacagaaaccaggacagccacccaaactcctcatctctgctgcatccaacgtagaatctggggtccctgccaggtttagtggcagtgggtctgggacagacttcagcctcaacatccatcctgtggaggaggatgatattgcaatgtatttctgtcagcaaagtaggaaggttccttggacgttcggtggaggcaccaagctggaaatcaaacggggtggcggtggctcgggcggaggtgggtcgggtggcggcggatctcaggtgcagctgaaggagtcaggacctggcctggtggcgccctcacagagcctgtccatcacatgcaccgtctcagggttctcattaaccggctatggtgtaaactgggttcgccagcctccaggaaagggtctggagtggctgggaatgatatggggtgatggaagcacagactataattcagctctcaaatccagactgagcatcaccaaggacaactccaagagccaagttttcttaaaaatgaacagtctgcaaactgatgacacagccagatactactgtgccagagatggttatagtaactttcattactatgttatggactactggggtcaaggaacctcagtcaccgtctcctctgatcag

SEQ ID NO: 254 - protein, 271 aa, Artificial sequence
  2e12 scFv
MDFQVQIFSFLLISASVIMSRGVDIVLTQSPASLAVSLGQRATISCRASESVEYYVTSLMQWYQQKPGQPPKLLISAASNVESGVPARFSGSGSGTDFSLNIHPVEEDDIAMYFCQQSRKVPWTFGGGTKLEIKRGGGGSGGGGSGGGGSQVQLKESGPGLVAPSQSLSITCTVSGFSLTGYGVNWVRQPPGKGLEWLGMIWGDGSTDYNSALKSRLSITKDNSKSQVFLKMNSLQTDDTARYYCARDGYSNFHYYVMDYWGQGTSVTVSS

SEQ ID NO: 255 - DNA, 393 bp, Artificial sequence
  VL region nucleotide sequence of 10A8
atggattttcaagtgcagattttcagcttcctgctaatcagtgcttcagtcataatgtccagaggagtcgacatccagatgacacagtctccatcctcactgtctgcatctctgggaggcaaagtcaccatcacttgcaaggcaagccaagacattaagaagtatataggttggtaccaacacaagcctggaaaaggtcccaggctgctcatatattacacatctacattacagccaggcatcccatcaaggttcagtggaagtgggtctgggagagattattccctcagcatcagaaacctggagcctgaagatattgcaacttattattgtcaacagtatgataatcttccattgacgttcggctcggggacaaagttggaaataaaacgg

SEQ ID NO: 256 - protein, 131 aa, Artificial sequence
  VL region pp sequence of 10A8
MDFQVQIFSFLLISASVIMSRGVDIQMTQSPSSLSASLGGKVTITCKASQDIKKYIGWYQHKPGKGPRLLIYYTSTLQPGIPSRFSGSGSGRDYSLSIRNLEPEDIATYYCQQYDNLPLTFGSGTKLEIKR

SEQ ID NO: 257 - DNA, 362 bp, Artificial sequence
  VH region nucleotide sequence of 10A8
gatgtacagcttcaggagtcaggacctggcctcgtgaaaccttctcagtctctgtctctcacctgctctgtcactggctactccatcaccagtggtttctactggaactggatccgacagtttccgggaaacaaactggaatggatgggccacataagccacgacggtaggaataactacaacccatctctcataaatcgaatctccatcactcgtgacacatctaagaaccagtttttcctgaagttgagttctgtgactactgaggacacagctacatatttctgtgcaagacactacggtagtagcggagctatggactactggggtcaaggaacctcagtcaccgtctcctctgatca

SEQ ID NO: 258 - protein, 119 aa, Artificial sequence
  VH region pp sequence of 10A8
DVQLQESGPGLVKPSQSLSLTCSVTGYSITSGFYWNWIRQFPGNKLEWMGHISHDGRNNYNPSLINRISITRDTSKNQFFLKLSSVTTEDTATYFCARHYGSSGAMDYWGQGTSVTVSS

SEQ ID NO: 259 - DNA, 806 bp, Artificial sequence
  10A8 ScFv pn sequence
aagcttatggattttcaagtgcagattttcagcttcctgctaatcagtgcttcagtcataatgtccagaggagtcgacatccagatgacacagtctccatcctcactgtctgcatctctgggaggcaaagtcaccatcacttgcaaggcaagccaagacattaagaagtatataggttggtaccaacacaagcctggaaaaggtcccaggctgctcatatattacacatctacattacagccaggcatcccatcaaggttcagtggaagtgggtctgggagagattattccctcagcatcagaaacctggagcctgaagatattgcaacttattattgtcaacagtatgataatcttccattgacgttcggctcggggacaaagttggaaataaaacggggtggcggtggctcgggcggtggtgggtcgggtggcggcggatctgatgtacagcttcaggagtcaggacctggcctcgtgaaaccttctcagtctctgtctctcacctgctctgtcactggctactccatcaccagtggtttctactggaactggatccgacagtttccgggaaacaaactggaatggatgggccacataagccacgacggtaggaataactacaacccatctctcataaatcgaatctccatcactcgtgacacatctaagaaccagtttttcctgaagttgagttctgtgactactgaggacacagctacatatttctgtgcaagacactacggtagtagcggagctatggactactggggtcaaggaacctcagtcaccgtctcctctgatca

SEQ ID NO: 260 - protein, 266 aa, Artificial sequence
  10A8 scFv
MDFQVQIFSFLLISASVIMSRGVDIQMTQSPSSLSASLGGKVTITCKASQDIKKYIGWYQHKPGKGPRLLIYYTSTLQPGIPSRFSGSGSGRDYSLSIRNLEPEDIATYYCQQYDNLPLTFGSGTKLEIKRGGGGSGGGGSGGGGSDVQLQESGPGLVKPSQSLSLTCSVTGYSITSGFYWNWIRQFPGNKLEWMGHISHDGRNNYNPSLINRISITRDTSKNQFFLKLSSVTTEDTATYFCARHYGSSGAMDYWGQGTSVTVSSD

SEQ ID NO: 261 - DNA, 417 bp, Artificial sequence
  VH region nucleotide sequence of 500A2
atggcatggagctgcattattttcttcttggtatcagtaattacaggtgtccattcccaggtcaagctgcagcagtccggttctgaactagggaaacctggggcctcagtgaaactgtcctgcaagacttcaggctacatattcacagatcactatatttcttgggtgaaacagaagcctggagaaagcctgcagtggataggaaatgtttatggtggaaatggtggtacaagctacaatcaaaaattccagggcaaggccacactgactgtagataaaatctctagcacagcctacatggaactcagcagcctgacatctgaggattctgccatctattactgtgcaagaaggccggtagcgacgggccatgctatggactactggggtcaggggatccaagttaccgtctcctca

SEQ ID NO: 262 - protein, 139 aa, Artificial sequence
  VH region pp sequence of 500A2
MAWSCIIFFLVSVITGVHSQVKLQQSGSELGKPGASVKLSCKTSGYIFTDHYISWVKQKPGESLQWIGNVYGGNGGTSYNQKFQGKATLTVDKISSTAYMELSSLTSEDSAIYYCARRPVATGHAMDYWGQGIQVTVSS

SEQ ID NO: 263 - DNA, 381 bp, Artificial sequence
  VL region nucleotide sequence of 500A2
atgttgtatacatctcagctccttgggcttttactcttctggatttcagcctccagaagtgacatagtgctgactcagactccagccactctgtctctaattcctggagaaagagtcacaatgacctgtaagaccagtcagaatattggcacaatcttacactggtatcaccaaaaaccaaaggaggctccaagggctctcatcaagtatgcttcgcagtccattcctgggatcccctccagattcagtggcagtggttcggaaacagatttcactctcagcatcaataacctggagcctgatgatatcggaatttattactgtcaacaaagtagaagctggcctgtcacgttcggtcctggcaccaagctggagataaaa

SEQ ID NO: 264 - protein, 127 aa, Artificial sequence
  VL region pp sequence of 500A2
MLYTSQLLGLLLFWISASRSDIVLTQTPATLSLIPGERVTMTCKTSQNIGTILHWYHQKPKEAPRALIKYASQSIPGIPSRFSGSGSETDFTLSINNLEPDDIGIYYCQQSRSWPVTFGPGTKLEIK

SEQ ID NO: 265 - DNA, 1671 bp, Artificial sequence
  40.2.220-ScFv-IgG-CD80 pn sequence
aagcttatggattttcaagtgcagattttcagcttcctgctaatcagtgcttcagtcataatgtccagaggagtcgacattgttctgactcagtctccagccaccctgtctgtgactccaggagatagagtctctctttcctgcagggccagccagagtattagcgactacttacactggtatcaacaaaaatcacatgagtctccaaggcttctcatcaaatatgcttcccattccatctctgggatcccctccaggttcagtggcagtggatcagggtcagatttcactctcagtatcaacagtgtggaacctgaagatgttggaatttattactgtcaacatggtcacagctttccgtggacgttcggtggaggcaccaagctggaaatcaaacggggtggcggtggctcgggcggaggtgggtcgggtggcggcggatctcagatccagttggtgcaatctggacctgagctgaagaagcctggagagacagtcaggatctcctgcaaggcttctgggtatgccttcacaactactggaatgcagtgggtgcaagagatgccaggaaagggtttgaagtggattggctggataaacaccccactctggagtgccaaaatatgtagaagacttcaaggacggtttgccttctctttggaaacctctgccaacactgcatatttacagataagcaacctcaaagatgaggacacggctacgtatttctgtgtgagatccgggaatggtaactatgacctggcctactttgcttactggggccaagggacactggtcactgtctctgatctggagcccaaatcttctgacaaaactcacacatccccaccgtccccagcacctgaactcctggggggatcgtcagtcttcctcttccccccaaaacccaaggacaccctcatgatctcccggacccctgaggtcacatgcgtggtggtggacgtgagccacgaagaccctgaggtcaagttcaactggtacgtggacggcgtggaggtgcataatgccaagacaaagccgcgggaggagcagtacaacagcacgtaccgtgtggtcagcgtcctcaccgtcctgcaccaggactggctgaatggcaaggagtacaagtgcaaggtctccaacaaagccctcccagcccccatcgagaaaaccatctccaaagccaaagggcagccccgagaaccacaggtgtacaccctgcccccatcccgggatgagctgaccaagaaccaggtcagcctgacctgcctggtcaaaggcttctatcccagcgacatcgccgtggagtgggagagcaatgggcagccggagaacaactacaagaccacgcctcccgtgctggactccgacggctccttcttcctctacagcaagctcaccgtggacaagagcaggtggcagcaggggaacgtcttctcatgctccgtgatgcatgaggctctgcacaaccactacacgcagaagagcctctccctgtctccgggtaaagcggatccttcgaacctgctcccatcctgggccattaccttaatctcagtaaatggaatttttgtgatatgctgcctgacctactgctttgccccaagatgcagagagagaaggaggaatgagagattgagaagggaaagtgtacgccctgtataaatcgat

SEQ ID NO: 266 - protein, 552 aa, Artificial sequence
  40.2.220-ScFv-IgG-CD80 pn sequence
MDFQVQIFSFLLISASVIMSRGVDIVLTQSPATLSVTPGDRVSLSCRASQSISDYLHWYQQKSHESPRLLIKYASHSISGIPSRFSGSGSGSDFTLSINSVEPEDVGIYYCQHGHSFPWTFGGGTKLEIKRGGGGSGGGGSGGGGSQIQLVQSGPELKKPGETVRISCKASGYAFTTTGMQWVQEMPGKGLKWIGWINTPLWSAKICRRLQGRFAFSLETSANTAYLQISNLKDEDTATYFCVRSGNGNYDLAYFAYWGQGTLVTVSDLEPKSSDKTHTSPPSPAPELLGGSSVFLFPPKPKDTLMISRTPEVTCVVVDVSHEDPEVKFNWYVDGVEVHNAKTKPREEQYNSTYRVVSVLTVLHQDWLNGKEYKCKVSNKALPAPIEKTISKAKGQPREPQVYTLPPSRDELTKNQVSLTCLVKGFYPSDIAVEWESNGQPENNYKTTPPVLDSDGSFFLYSKLTVDKSRWQQGNVFSCSVMHEALHNHYTQKSLSLSPGKADPSNLLPSWAITLISVNGIFVICCLTYCFAPRCRERRRNERLRRESVRPV

SEQ ID NO: 267 - DNA, 1683 bp, Artificial sequence
  2E12-ScFv-IgG-CD80 pn sequence
aagcttatggattttcaagtgcagattttcagcttcctgctaatcagtgcttcagtcataatgtccagaggagtcgacattgtgctcacccaatctccagcttctttggctgtgtctctaggtcagagagccaccatctcctgcagagccagtgaaagtgttgaatattatgtcacaagtttaatgcagtggtaccaacagaaaccaggacagccacccaaactcctcatctctgctgcatccaacgtagaatctggggtccctgccaggtttagtggcagtgggtctgggacagacttcagcctcaacatccatcctgtggaggaggatgatattgcaatgtatttctgtcagcaaagtaggaaggttccttggacgttcggtggaggcaccaagctggaaatcaaacggggtggcggtggctcgggcggaggtgggtcgggtggcggcggatctcaggtgcagctgaaggagtcaggacctggcctggtggcgccctcacagagcctgtccatcacatgcaccgtctcagggttctcattaaccggctatggtgtaaactgggttcgccagcctccaggaaagggtctggagtggctgggaatgatatggggtgatggaagcacagactataattcagctctcaaatccagactgagcatcaccaaggacaactccaagagccaagttttcttaaaaatgaacagtctgcaaactgatgacacagccagatactactgtgccagagatggttatagtaactttcattactatgttatggactactggggtcaaggaacctcagtcaccgtctcctcagatctggagcccaaatcttctgacaaaactcacacatccccaccgtccccagcacctgaactcctggggggatcgtcagtcttcctcttccccccaaaacccaaggacaccctcatgatctcccggacccctgaggtcacatgcgtggtggtggacgtgagccacgaagaccctgaggtcaagttcaactggtacgtggacggcgtggaggtgcataatgccaagacaaagccgcgggaggagcagtacaacagcacgtaccgtgtggtcagcgtcctcaccgtcctgcaccaggactggctgaatggcaaggagtacaagtgcaaggtctccaacaaagccctcccagcccccatcgagaaaaccatctccaaagccaaagggcagccccgagaaccacaggtgtacaccctgcccccatcccgggatgagctgaccaagaaccaggtcagcctgacctgcctggtcaaaggcttctatcccagcgacatcgccgtggagtgggagagcaatgggcagccggagaacaactacaagaccacgcctcccgtgctggactccgacggctccttcttcctctacagcaagctcaccgtggacaagagcaggtggcagcaggggaacgtcttctcatgctccgtgatgcatgaggctctgcacaaccactacacgcagaagagcctctccctgtctccgggtaaagcggatccttcgaacctgctcccatcctgggccattaccttaatctcagtaaatggaatttttgtgatatgctgcctgacctactgctttgccccaagatgcagagagagaaggaggaatgagagattgagaagggaaagtgtacgccctgtataaatcgat

SEQ ID NO: 268 - protein, 556 aa, Artificial sequence
  2E12-ScFv-IgG-CD80 pn sequence
MDFQVQIFSFLLISASVIMSRGVDIVLTQSPASLAVSLGQRATISCRASESVEYYVTSLMQWYQQKPGQPPKLLISAASNVESGVPARFSGSGSGTDFSLNIHPVEEDDIAMYFCQQSRKVPWTFGGGTKLEIKRGGGGSGGGGSGGGGSQVQLKESGPGLVAPSQSLSITCTVSGFSLTGYGVNWVRQPPGKGLEWLGMIWGDGSTDYNSALKSRLSITKDNSKSQVFLKMNSLQTDDTARYYCARDGYSNFHYYVMDYWGQGTSVTVSSDLEPKSSDKTHTSPPSPAPELLGGSSVFLFPPKPKDTLMISRTPEVTCVVVDVSHEDPEVKFNWYVDGVEVHNAKTKPREEQYNSTYRVVSVLTVLHQDWLNGKEYKCKVSNKALPAPIEKTISKAKGQPREPQVYTLPPSRDELTKNQVSLTCLVKGFYPSDIAVEWESNGQPENNYKTTPPVLDSDGSFFLYSKLTVDKSRWQQGNVFSCSVMHEALHNHYTQKSLSLSPGKADPSNLLPSWAITLISVNGIFVICCLTYCFAPRCRERRRNERLRRESVRPV

SEQ ID NO: 269 - DNA, 1665 bp, Artificial sequence
  10A8-ScFv-IgG-CD80 pn sequence
aagcttatggattttcaagtgcagattttcagcttcctgctaatcagtgcttcagtcataatgtccagaggagtcgacatccagatgacacagtctccatcctcactgtctgcatctctgggaggcaaagtcaccatcacttgcaaggcaagccaagacattaagaagtatataggttggtaccaacacaagcctggaaaaggtcccaggctgctcatatattacacatctacattacagccaggcatcccatcaaggttcagtggaagtgggtctgggagagattattccctcagcatcagaaacctggagcctgaagatattgcaacttattattgtcaacagtatgataatcttccattgacgttcggctcggggacaaagttggaaataaaacggggtggcggtggctcgggcggtggtgggtcgggtggcggcggatctgatgtacagcttcaggagtcaggacctggcctcgtgaaaccttctcagtctctgtctctcacctgctctgtcactggctactccatcaccagtggtttctactggaactggatccgacagtttccgggaaacaaactggaatggatgggccacataagccacgacggtaggaataactacaacccatctctcataaatcgaatctccatcactcgtgacacatctaagaaccagtttttcctgaagttgagttctgtgactactgaggacacagctacatatttctgtgcaagacactacggtagtagcggagctatggactactggggtcaaggaacctcagtcaccgtctcctctgatctggagcccaaatcttctgacaaaactcacacatccccaccgtccccagcacctgaactcctggggggatcgtcagtcttcctcttccccccaaaacccaaggacaccctcatgatctcccggacccctgaggtcacatgcgtggtggtggacgtgagccacgaagaccctgaggtcaagttcaactggtacgtggacggcgtggaggtgcataatgccaagacaaagccgcgggaggagcagtacaacagcacgtaccgtgtggtcagcgtcctcaccgtcctgcaccaggactggctgaatggcaaggagtacaagtgcaaggtctccaacaaagccctcccagcccccatcgagaaaaccatctccaaagccaaagggcagccccgagaaccacaggtgtacaccctgcccccatcccgggatgagctgaccaagaaccaggtcagcctgacctgcctggtcaaaggcttctatcccagcgacatcgccgtggagtgggagagcaatgggcagccggagaacaactacaagaccacgcctcccgtgctggactccgacggctccttcttcctctacagcaagctcaccgtggacaagagcaggtggcagcaggggaacgtcttctcatgctccgtgatgcatgaggctctgcacaaccactacacgcagaagagcctctccctgtctccgggtaaagcggatccttcgaacctgctcccatcctgggccattaccttaatctcagtaaatggaatttttgtgatatgctgcctgacctactgctttgccccaagatgcagagagagaaggaggaatgagagattgagaagggaaagtgtacgccctgtataaatcgat

SEQ ID NO: 270 - protein, 550 aa, Artificial sequence
  10A8-ScFv-IgG-CD80 pn sequence
MDFQVQIFSFLLISASVIMSRGVDIQMTQSPSSLSASLGGKVTITCKASQDIKKYIGWYQHKPGKGPRLLIYYTSTLQPGIPSRFSGSGSGRDYSLSIRNLEPEDIATYYCQQYDNLPLTFGSGTKLEIKRGGGGSGGGGSGGGGSDVQLQESGPGLVKPSQSLSLTCSVTGYSITSGFYWNWIRQFPGNKLEWMGHISHDGRNNYNPSLINRISITRDTSKNQFFLKLSSVTTEDTATYFCARHYGSSGAMDYWGQGTSVTVSSDLEPKSSDKTHTSPPSPAPELLGGSSVFLFPPKPKDTLMISRTPEVTCVVVDVSHEDPEVKFNWYVDGVEVHNAKTKPREEQYNSTYRVVSVLTVLHQDWLNGKEYKCKVSNKALPAPIEKTISKAKGQPREPQVYTLPPSRDELTKNQVSLTCLVKGFYPSDIAVEWESNGQPENNYKTTPPVLDSDGSFFLYSKLTVDKSRWQQGNVFSCSVMHEALHNHYTQKSLSLSPGKADPSNLLPSWAITLISVNGIFVICCLTYCFAPRCRERRRNERLRRESVRPV

SEQ ID NO: 271 - DNA, 1653 bp, Artificial sequence
  500A2-ScFv-IgG-CD80 pn sequence
atgttgtatacatctcagctccttgggcttttactcttctggatttcagcctccagaagtgacatagtgctgactcagactccagccactctgtctctaattcctggagaaagagtcacaatgacctgtaagaccagtcagaatattggcacaatcttacactggtatcaccaaaaaccaaaggaggctccaagggctctcatcaagtatgcttcgcagtccattcctgggatcccctccagattcagtggcagtggttcggaaacagatttcactctcagcatcaataacctggagcctgatgatatcggaatttattactgtcaacaaagtagaagctggcctgtcacgttcggtcctggcaccaagctggagataaaacggggtggcggtggctcgggcggaggtgggtcgggtggcggcggatctcaggtcaagctgcagcagtccggttctgaactagggaaacctggggcctcagtgaaactgtcctgcaagacttcaggctacatattcacagatcactatatttcttgggtgaaacagaagcctggagaaagcctgcagtggataggaaatgtttatggtggaaatggtggtacaagctacaatcaaaaattccagggcaaggccacactgactgtagataaaatctctagcacagcctacatggaactcagcagcctgacatctgaggattctgccatctattactgtgcaagaaggccggtagcgacgggccatgctatggactactggggtcaggggatccaagttaccgtctcctctgatctggagcccaaatcttctgacaaaactcacacatccccaccgtccccagcacctgaactcctggggggatcgtcagtcttcctcttccccccaaaacccaaggacaccctcatgatctcccggacccctgaggtcacatgcgtggtggtggacgtgagccacgaagaccctgaggtcaagttcaactggtacgtggacggcgtggaggtgcataatgccaagacaaagccgcgggaggagcagtacaacagcacgtaccgtgtggtcagcgtcctcaccgtcctgcaccaggactggctgaatggcaaggagtacaagtgcaaggtctccaacaaagccctcccagcccccatcgagaaaaccatctccaaagccaaagggcagccccgagaaccacaggtgtacaccctgcccccatcccgggatgagctgaccaagaaccaggtcagcctgacctgcctggtcaaaggcttctatcccagcgacatcgccgtggagtgggagagcaatgggcagccggagaacaactacaagaccacgcctcccgtgctggactccgacggctccttcttcctctacagcaagctcaccgtggacaagagcaggtggcagcaggggaacgtcttctcatgctccgtgatgcatgaggctctgcacaaccactacacgcagaagagcctctccctgtctccgggtaaagcggatccttcgaacctgctcccatcctgggccattaccttaatctcagtaaatggaatttttgtgatatgctgcctgacctactgctttgccccaagatgcagagagagaaggaggaatgagagattgagaagggaaagtgtacgccctgtataaatcgat

SEQ ID NO: 272 - protein, 548 aa, Artificial sequence
  500A2-ScFv-IgG-CD80 pn sequence
MLYTSQLLGLLLFWISASRSDIVLTQTPATLSLIPGERVTMTCKTSQNIGTILHWYHQKPKEAPRALIKYASQSIPGIPSRFSGSGSETDFTLSINNLEPDDIGIYYCQQSRSWPVTFGPGTKLEIKRGGGGSGGGGSGGGGSQVKLQQSGSELGKPGASVKLSCKTSGYIFTDHYISWVKQKPGESLQWIGNVYGGNGGTSYNQKFQGKATLTVDKISSTAYMELSSLTSEDSAIYYCARRPVATGHAMDYWGQGIQVTVSSDLEPKSSDKTHTSPPSPAPELLGGSSVFLFPPKPKDTLMISRTPEVTCVVVDVSHEDPEVKFNWYVDGVEVHNAKTKPREEQYNSTYRVVSVLTVLHQDWLNGKEYKCKVSNKALPAPIEKTISKAKGQPREPQVYTLPPSRDELTKNQVSLTCLVKGFYPSDIAVEWESNGQPENNYKTTPPVLDSDGSFFLYSKLTVDKSRWQQGNVFSCSVMHEALHNHYTQKSLSLSPGKADPSNLLPSWAITLISVNGIFVICCLTYCFAPRCRERRRNERLRRESVRPV

SEQ ID NO: 273 - DNA, 1521 bp, Artificial sequence
  2H7 ScFv-Ig (capable of binding CD20)
aagcttgccgccatggattttcaagtgcagattttcagcttcctgctaatcagtgcttcagtcataattgccagaggacaaattgttctctcccagtctccagcaatcctgtctgcatctccaggggagaaggtcacaatgacttgcagggccagctcaagtgtaagttacatgcactggtaccagcagaagccaggatcctcccccaaaccctggatttatgccccatccaacctggcttctggagtccctgctcgcttcagtggcagtgggtctgggacctcttactctctcacaatcagcagagtggaggctgaagatgctgccacttattactgccagcagtggagttttaacccacccacgttcggtgctgggaccaagctggagctgaaagatggcggtggctcgggcggtggtggatctggaggaggtgggagctctcaggcttatctacagcagtctggggctgagctggtgaggcctggggcctcagtgaagatgtcctgcaaggcttctggctacacatttaccagttacaatatgcactgggtaaagcagacacctagacagggcctggaatggattggagctatttatccaggaaatggtgatacttcctacaatcagaagttcaagggcaaggccacactgactgtagacaaatcctccagcacagcctacatgcagctcagcagcctgacatctgaagactctgcggtctatttctgtgcaagagtggtgtactatagtaactcttactggtacttcgatgtctggggcacagggaccacggtcaccgtctcttctgatcaggagcccaaatcttctgacaaaactcacacatccccaccgtccccagcacctgaactcctggggggaccgtcagtcttcctcttccccccaaaacccaaggacaccctcatgatctcccggacccctgaggtcacatgcgtggtggtggacgtgagccacgaagaccctgaggtcaagttcaactggtacgtggacggcgtggaggtgcataatgccaagacaaagccgcgggaggagcagtacaacagcacgtaccgtgtggtcagcgtcctcaccgtcctgcaccaggactggctgaatggcaaggagtacaagtgcaaggtctccaacaaagccctcccagcccccatcgagaaaacaatctccaaagccaaagggcagccccgagaaccacaggtgtacaccctgcccccatcccgggatgagctgaccaagaaccaggtcagcctgacctgcctggtcaaaggcttctatcccagcgacatcgccgtggagtgggagagcaatgggcagccggagaacaactacaagaccacgcctcccgtgctggactccgacggctccttcttcctctacagcaagctcaccgtggacaagagcaggtggcagcaggggaacgtcttctcatgctccgtgatgcatgaggctctgcacaaccactacacgcagaagagcctctccctgtctccgggtaaatgatctaga

SEQ ID NO: 274 - protein, 500 aa, Artificial sequence
  2H7 ScFv-Ig (capable of binding CD20)
MDFQVQIFSFLLISASVIIARGQIVLSQSPAILSASPGEKVTMTCRASSSVSYMHWYQQKPGSSPKPWIYAPSNLASGVPARFSGSGSGTSYSLTISRVEAEDAATYYCQQWSFNPPTFGAGTKLELKDGGGSGGGGSGGGGSSQAYLQQSGAELVRPGASVKMSCKASGYTFTSYNMHWVKQTPRQGLEWIGAIYPGNGDTSYNQKFKGKATLTVDKSSSTAYMQLSSLTSEDSAVYFCARVVYYSNSYWYFDVWGTGTTVTVSSDQEPKSSDKTHTSPPSPAPELLGGPSVFLFPPKPKDTLMISRTPEVTCVVVDVSHEDPEVKFNWYVDGVEVHNAKTKPREEQYNSTYRVVSVLTVLHQDWLNGKEYKCKVSNKALPAPIEKTISKAKGQPREPQVYTLPPSRDELTKNQVSLTCLVKGFYPSDIAVEWESNGQPENNYKTTPPVLDSDGSFFLYSKLTVDKSRWQQGNVFSCSVMHEALHNHYTQKSLSLSPGK

SEQ ID NO: 275 - DNA, 64 bp, Artificial sequence
  Oligo to make IgG hinge SSC mutant using IgG hinge SSS as a template
gttgttgatcaggagcccaaatcttctgacaaaactcacacatctccaccgtgcccagcacctg

SEQ ID NO: 276 - DNA, 51 bp, Artificial sequence
  Oligo to make IgG hinge SCS mutant using IgG hinge SSS as a template
gttgttgatcaggagcccaaatcttctgacaaaactcacacatgcccaccg

SEQ ID NO: 277 - DNA, 39 bp, Artificial sequence
  Oligo to make IGG hinge CSS mutant using IgG hinge SSS as a template
gttgttgatcaggagcccaaatcttgtgacaaaactcac

SEQ ID NO: 278 - DNA, 52 bp, Artificial sequence
  3' oligo to amplify constant regions for creating IgG hinge mutants
gttgtttctagatcatttacccggagacagggagaggctcttctgcgtgtag

SEQ ID NO: 279 - DNA, 56 bp, Artificial sequence
  Oligo that mutates VH11 L to S
ggaggtgggagctctcaggcttatctacagcagtctggggctgagtcggtgaggcc

SEQ ID NO: 280 - DNA, 30 bp, Artificial sequence
  3' oligo for amplifying IgG1 constant regions
gtctctagactatcatttacccggagacag

SEQ ID NO: 281 - DNA, 54 bp, Artificial sequence
  5' oligo for first PCR to insert IgA hinge into IgG1 CH2-CH3
ccatctccctcaactccacctaccccatctccctcatgcgcacctgaactcctg

SEQ ID NO: 282 - DNA, 50 bp, Artificial sequence
  5' oligo for second PCR to insert IgA hinge into fused to IgG1 CH2
gttgttgatcagccagttccctcaactccacctaccccatctccccaact

SEQ ID NO: 283 - DNA, 1536 bp, Artificial sequence
  2H7scFv-hIgAH-WThIgG1CH2CH3
aagcttgccgccatggattttcaagtgcagattttcagcttcctgctaatcagtgcttcagtcataattgccagaggacaaattgttctctcccagtctccagcaatcctgtctgcatctccaggggagaaggtcacaatgacttgcagggccagctcaagtgtaagttacatgcactggtaccagcagaagccaggatcctcccccaaaccctggatttatgccccatccaacctggcttctggagtccctgctcgcttcagtggcagtgggtctgggacctcttactctctcacaatcagcagagtggaggctgaagatgctgccacttattactgccagcagtggagttttaacccacccacgttcggtgctgggaccaagctggagctgaaagatggcggtggctcgggcggtggtggatctggaggaggtgggagctctcaggcttatctacagcagtctggggctgagctggtgaggcctggggcctcagtgaagatgtcctgcaaggcttctggctacacatttaccagttacaatatgcactgggtaaagcagacacctagacagggcctggaatggattggagctatttatccaggaaatggtgatacttcctacaatcagaagttcaagggcaaggccacactgactgtagacaaatcctccagcacagcctacatgcagctcagcagcctgacatctgaagactctgcggtctatttctgtgcaagagtggtgtactatagtaactcttactggtacttcgatgtctggggcacagggaccacggtcaccgtctctgatcagccagttccctcaactccacctaccccatctccctcaactccacctaccccatctccctcatgcgcacctgaactcctggggggaccgtcagtcttcctcttccccccaaaacccaaggacaccctcatgatctcccggacccctgaggtcacatgcgtggtggtggacgtgagccacgaagaccctgaggtcaagttcaactggtacgtggacggcgtggaggtgcataatgccaagacaaagccgcgggaggagcagtacaacagcacgtaccgtgtggtcagcgtcctcaccgtcctgcaccaggactggctgaatggcaaggagtacaagtgcaaggtctccaacaaagccctcccagcccccatcgagaaaacaatctccaaagccaaagggcagccccgagaaccacaggtgtacaccctgcccccatcccgggatgagctgaccaagaaccaggtcagcctgacctgcctggtcaaaggcttctatcccagcgacatcgccgtggagtgggagagcaatgggcagccggagaacaactacaagaccacgcctcccgtgctggactccgacggctccttcttcctctacagcaagctcaccgtggacaagagcaggtggcagcaggggaacgtcttctcatgctccgtgatgcatgaggctctgcacaaccactacacgcagaagagcctctccctgtctccgggtaaatgatctaga

SEQ ID NO: 284 - protein, 505 aa, Artificial sequence
  2H7scFv-hIgAH-WThIgG1CH2CH3
MDFQVQIFSFLLISASVIIARGQIVLSQSPAILSASPGEKVTMTCRASSSVSYMHWYQQKPGSSPKPWIYAPSNLASGVPARFSGSGSGTSYSLTISRVEAEDAATYYCQQWSFNPPTFGAGTKLELKDGGGSGGGGSGGGGSSQAYLQQSGAELVRPGASVKMSCKASGYTFTSYNMHWVKQTPRQGLEWIGAIYPGNGDTSYNQKFKGKATLTVDKSSSTAYMQLSSLTSEDSAVYFCARVVYYSNSYWYFDVWGTGTTVTVSDQPVPSTPPTPSPSTPPTPSPSCAPELLGGPSVFLFPPKPKDTLMISRTPEVTCVVVDVSHEDPEVKFNWYVDGVEVHNAKTKPREEQYNSTYRVVSVLTVLHQDWLNGKEYKCKVSNKALPAPIEKTISKAKGQPREPQVYTLPPSRDELTKNQVSLTCLVKGFYPSDIAVEWESNGQPENNYKTTPPVLDSDGSFFLYSKLTVDKSRWQQGNVFSCSVMHEALHNHYTQKSLSLSPGK

SEQ ID NO: 285 - DNA, 1584 bp, Artificial sequence
  2H7scFvIgAHIgACH2CH3
aagcttgccgccatggattttcaagtgcagattttcagcttcctgctaatcagtgcttcagtcataattgccagaggacaaattgttctctcccagtctccagcaatcctgtctgcatctccaggggagaaggtcacaatgacttgcagggccagctcaagtgtaagttacatgcactggtaccagcagaagccaggatcctcccccaaaccctggatttatgccccatccaacctggcttctggagtccctgctcgcttcagtggcagtgggtctgggacctcttactctctcacaatcagcagagtggaggctgaagatgctgccacttattactgccagcagtggagttttaacccacccacgttcggtgctgggaccaagctggagctgaaagatggcggtggctcgggcggtggtggatctggaggaggtgggagctctcaggcttatctacagcagtctggggctgagctggtgaggcctggggcctcagtgaagatgtcctgcaaggcttctggctacacatttaccagttacaatatgcactgggtaaagcagacacctagacagggcctggaatggattggagctatttatccaggaaatggtgatacttcctacaatcagaagttcaagggcaaggccacactgactgtagacaaatcctccagcacagcctacatgcagctcagcagcctgacatctgaagactctgcggtctatttctgtgcaagagtggtgtactatagtaactcttactggtacttcgatgtctggggcacagggaccacggtcaccgtctcttctgatcagccagttccctcaactccacctaccccatctccctcaactccacctaccccatctccctcatgctgccacccccgactgtcactgcaccgaccggccctcgaggacctgctcttaggttcagaagcgatcctcacgtgcacactgaccggcctgagagatgcctcaggtgtcaccttcacctggacgccctcaagtgggaagagcgctgttcaaggaccacctgaccgtgacctctgtggctgctacagcgtgtccagtgtcctgccgggctgtgccgagccatggaaccatgggaagaccttcacttgcactgctgcctaccccgagtccaagaccccgctaaccgccaccctctcaaaatccggaaacacattccggcccgaggtccacctgctgccgccgccgtcggaggagctggccctgaacgagctggtgacgctgacgtgcctggcacgtggcttcagccccaaggatgtgctggttcgctggctgcaggggtcacaggagctgccccgcgagaagtacctgacttgggcatcccggcaggagcccagccagggcaccaccaccttcgctgtgaccagcatactgcgcgtggcagccgaggactggaagaagggggacaccttctcctgcatggtgggccacgaggccctgccgctggccttcacacagaagaccatcgaccgcttggcgggtaaacccacccatgtcaatgtgtctgttgtcatggcggaggtggacggcacctgctactgataatctaga

SEQ ID NO: 286 - protein, 520 aa, Artificial sequence
  2H7scFvIgAHIgACH2CH3
MDFQVQIFSFLLISASVIIARGQIVLSQSPAILSASPGEKVTMTCRASSSVSYMHWYQQKPGSSPKPWIYAPSNLASGVPARFSGSGSGTSYSLTISRVEAEDAATYYCQQWSFNPPTFGAGTKLELKDGGGSGGGGSGGGGSSQAYLQQSGAELVRPGASVKMSCKASGYTFTSYNMHWVKQTPRQGLEWIGAIYPGNGDTSYNQKFKGKATLTVDKSSSTAYMQLSSLTSEDSAVYFCARVVYYSNSYWYFDVWGTGTTVTVSSDQPVPSTPPTPSPSTPPTPSPSCCHPRLSLHRPALEDLLLGSEAILTCTLTGLRDASGVTFTWTPSSGKSAVQGPPDRDLCGCYSVSSVLPGCAEPWNHGKTFTCTAAYPESKTPLTATLSKSGNTFRPEVHLLPPPSEELALNELVTLTCLARGFSPKDVLVRWLQGSQELPREKYLTWASRQEPSQGTTTFAVTSILRVAAEDWKKGDTFSCMVGHEALPLAFTQKTIDRLAGKPTHVNVSVVMAEVDGTCY

SEQ ID NO: 287 - DNA, 775 bp, Artificial sequence
  IgAHIgACH2CH3
tgatcagccagttccctcaactccacctaccccatctccctcaactccacctaccccatctccctcatgctgccacccccgactgtcactgcaccgaccggccctcgaggacctgctcttaggttcagaagcgatcctcacgtgcacactgaccggcctgagagatgcctcaggtgtcaccttcacctggacgccctcaagtgggaagagcgctgttcaaggaccacctgaccgtgacctctgtggctgctacagcgtgtccagtgtcctgccgggctgtgccgagccatggaaccatgggaagaccttcacttgcactgctgcctaccccgagtccaagaccccgctaaccgccaccctctcaaaatccggaaacacattccggcccgaggtccacctgctgccgccgccgtcggaggagctggccctgaacgagctggtgacgctgacgtgcctggcacgtggcttcagccccaaggatgtgctggttcgctggctgcaggggtcacaggagctgccccgcgagaagtacctgacttgggcatcccggcaggagcccagccagggcaccaccaccttcgctgtgaccagcatactgcgcgtggcagccgaggactggaagaagggggacaccttctcctgcatggtgggccacgaggccctgccgctggccttcacacagaagaccatcgaccgcttggcgggtaaacccacccatgtcaatgtgtctgttgtcatggcggaggtggacggcacctgctactgataatctaga

SEQ ID NO: 288 - protein, 254 aa, Artificial sequence
  IgAHIgACH2CH3
DQPVPSTPPTPSPSTPPTPSPSCCHPRLSLHRPALEDLLLGSEAILTCTLTGLRDASGVTFTWTPSSGKSAVQGPPDRDLCGCYSVSSVLPGCAEPWNHGKTFTCTAAYPESKTPLTATLSKSGNTFRPEVHLLPPPSEELALNELVTLTCLARGFSPKDVLVRWLQGSQELPREKYLTWASRQEPSQGTTTFAVTSILRVAAEDWKKGDTFSCMVGHEALPLAFTQKTIDRLAGKPTHVNVSVVMAEVDGTCY

SEQ ID NO: 289 - DNA, 51 bp, Artificial sequence
  huIgA3' primer
gttgtttctagattatcagtagcaggtgccgtccacctccgccatgacaac

SEQ ID NO: 290 - DNA, 429 bp, Artificial sequence
  Fusion polynucleotide
agatctcaagaagatgaaaggattgttcttgttgacaacaaatgtaagtgtgcccggattacttccaggatcatccgttcttccgaagatcctaatgaggacattgtggagagaaacatccgaattattgttcctctgaacaacagggagaatatctctgatcccacctcaccattgagaaccagatttgtgtaccatttgtctgacctcagctgtaaaaaatgtgatcctacagaagtggagctggataatcagatagttactgctacccagagcaatatctgtgatgaagacagtgctacagagacctgctacacttatgacagaaacaagtgctacacagctgtggtcccactcgtatatggtggtgagaccaaaatggtggaaacagccttaaccccagatgcctgctatcctgactaatctaga

SEQ ID NO: 291 - protein, 139 aa, Artificial sequence
  Fusion polypeptide
RSQEDERIVLVDNKCKCARITSRIIRSSEDPNEDIVERNIRIIVPLNNRENISDPTSPLRTRFVYHLSDLSCKKCDPTEVELDNQIVTATQSNICDEDSATETCYTYDRNKCYTAVVPLVYGGETKMVETALTPDACYP

SEQ ID NO: 292 - DNA, 36 bp, Artificial sequence
  5' oligo to PCR J chain
gttgttagatctcaagaagatgaaaggattgttctt

SEQ ID NO: 293 - DNA, 36 bp, Artificial sequence
  3' oligo to PCR J chain
gttgtttctagattagtcaggatagcaggcatctgg

SEQ ID NO: 294 - protein, 4 aa, Artificial sequence
  4 carboxy terminal amino acids deleted from IgA CH3
GTCY

SEQ ID NO: 295 - DNA, 763 bp, Artificial sequence; identical to SEQ ID NO: 37
  Fusion polynucleotide

SEQ ID NO: 296 - protein, 250 aa, Artificial sequence
  Fusion polypeptide
DQPVPSTPPTPSPSTPPTPSPSCCHPRLSLHRPALEDLLLGSEAILTCTLTGLRDASGVTFTWTPSSGKSAVQGPPDRDLCGCYSVSSVLPGCAEPWNHGKTFTCTAAYPESKTPLTATLSKSGNTFRPEVHLLPPPSEELALNELVTLTCLARGFSPKDVLVRWLQGSQELPREKYLTWASRQEPSQGTTTFAVTSILRVAAEDWKKGDTFSCMVGHEALPLAFTQKTIDRLAGKPTHVNVSVVMAEVD

SEQ ID NO: 297 - DNA, 45 bp, Artificial sequence
  3' oligo for construct with 4 amino acid deletion in IgA CH3
gttgtttctagattatcagtccacctccgccatgacaacagacac

SEQ ID NO: 298 - DNA, 1572 bp, Artificial sequence
  2H7hIgAHhIgATC (-4AA)
aagcttgccgccatggattttcaagtgcagattttcagcttcctgctaatcagtgcttcagtcataattgccagaggacaaattgttctctcccagtctccagcaatcctgtctgcatctccaggggagaaggtcacaatgacttgcagggccagctcaagtgtaagttacatgcactggtaccagcagaagccaggatcctcccccaaaccctggatttatgccccatccaacctggcttctggagtccctgctcgcttcagtggcagtgggtctgggacctcttactctctcacaatcagcagagtggaggctgaagatgctgccacttattactgccagcagtggagttttaacccacccacgttcggtgctgggaccaagctggagctgaaagatggcggtggctcgggcggtggtggatctggaggaggtgggagctctcaggcttatctacagcagtctggggctgagctggtgaggcctggggcctcagtgaagatgtcctgcaaggcttctggctacacatttaccagttacaatatgcactgggtaaagcagacacctagacagggcctggaatggattggagctatttatccaggaaatggtgatacttcctacaatcagaagttcaagggcaaggccacactgactgtagacaaatcctccagcacagcctacatgcagctcagcagcctgacatctgaagactctgcggtctatttctgtgcaagagtggtgtactatagtaactcttactggtacttcgatgtctggggcacagggaccacggtcaccgtctcttctgatcagccagttccctcaactccacctaccccatctccctcaactccacctaccccatctccctcatgctgccacccccgactgtcactgcaccgaccggccctcgaggacctgctcttaggttcagaagcgatcctcacgtgcacactgaccggcctgagagatgcctcaggtgtcaccttcacctggacgccctcaagtgggaagagcgctgttcaaggaccacctgaccgtgacctctgtggctgctacagcgtgtccagtgtcctgccgggctgtgccgagccatggaaccatgggaagaccttcacttgcactgctgcctaccccgagtccaagaccccgctaaccgccaccctctcaaaatccggaaacacattccggcccgaggtccacctgctgccgccgccgtcggaggagctggccctgaacgagctggtgacgctgacgtgcctggcacgtggcttcagccccaaggatgtgctggttcgctggctgcaggggtcacaggagctgccccgcgagaagtacctgacttgggcatcccggcaggagcccagccagggcaccaccaccttcgctgtgaccagcatactgcgcgtggcagccgaggactggaagaagggggacaccttctcctgcatggtgggccacgaggccctgccgctggccttcacacagaagaccatcgaccgcttggcgggtaaacccacccatgtcaatgtgtctgttgtcatggcggaggtggactgataatctaga

SEQ ID NO: 299 - protein, 516 aa, Artificial sequence
  2H7hIgAHhIgA-TC (-4AA) 2H7 IgA fusion protein with the truncated CH3 carboxy end
MDFQVQIFSFLLISASVIIARGQIVLSQSPAILSASPGEKVTMTCRASSSVSYMHWYQQKPGSSPKPWIYAPSNLASGVPARFSGSGSGTSYSLTISRVEAEDAATYYCQQWSFNPPTFGAGTKLELKDGGGSGGGGSGGGGSSQAYLQQSGAELVRPGASVKMSCKASGYTFTSYNMHWVKQTPRQGLEWIGAIYPGNGDTSYNQKFKGKATLTVDKSSSTAYMQLSSLTSEDSAVYFCARVVYYSNSYWYFDVWGTGTTVTVSSDQPVPSTPPTPSPSTPPTPSPSCCHPRLSLHRPALEDLLLGSEAILTCTLTGLRDASGVTFTWTPSSGKSAVQGPPDRDLCGCYSVSSVLPGCAEPWNHGKTFTCTAAYPESKTPLTATLSKSGNTFRPEVHLLPPPSEELALNELVTLTCLARGFSPKDVLVRWLQGSQELPREKYLTWASRQEPSQGTTTFAVTSILRVAAEDWKKGDTFSCMVGHEALPLAFTQKTIDRLAGKPTHVNVSVVMAEVD

SEQ ID NO: 300 - protein, 14 aa, Artificial sequence
  14 amino acids deleted from IgAH-T4 (so that total of 18 amino acids deleted from wild type IgA CH3
PTHVNVSVVMAEVD

SEQ ID NO: 301 - DNA, 45 bp, Artificial sequence
  3' oligo for engineering 14 amino acid from IgA-T4
gttgtttctagattatcatttacccgccaagcggtcgatggtctt

SEQ ID NO: 302 - DNA, 709 bp, Artificial sequence
  2H7 IgAH IgA-T18
tgatcagccagttccctcaactccacctaccccatctccctcaactccacctaccccatctccctcatgctgccacccccgactgtcactgcaccgaccggccctcgaggacctgctcttaggttcagaagcgatcctcacgtgcacactgaccggcctgagagatgcctcaggtgtcaccttcacctggacgccctcaagtgggaagagcgctgttcaaggaccacctgaccgtgacctctgtggctgctacagcgtgtccagtgtcctgccgggctgtgccgagccatggaaccatgggaagaccttcacttgcactgctgcctaccccgagtccaagaccccgctaaccgccaccctctcaaaatccggaaacacattccggcccgaggtccacctgctgccgccgccgtcggaggagctggccctgaacgagctggtgacgctgacgtgcctggcacgtggcttcagccccaaggatgtgctggttcgctggctgcaggggtcacaggagctgccccgcgagaagtacctgacttgggcatcccggcaggagcccagccagggcaccaccaccttcgctgtgaccagcatactgcgcgtggcagccgaggactggaagaagggggacaccttctcctgcatggtgggccacgaggccctgccgctggccttcacacagaagaccatcgaccgcttggcgggtaaa

SEQ ID NO: 303 - protein, 236 aa, Artificial sequence
  2H7 IgAH IgA-T18
DQPVPSTPPTPSPSTPPTPSPSCCHPRLSLHRPALEDLLLGSEAILTCTLTGLRDASGVTFTWTPSSGKSAVQGPPDRDLCGCYSVSSVLPGCAEPWNHGKTFTCTAAYPESKTPLTATLSKSGNTFRPEVHLLPPPSEELALNELVTLTCLARGFSPKDVLVRWLQGSQELPREKYLTWASRQEPSQGTTTFAVTSILRVAAEDWKKGDTFSCMVGHEALPLAFTQKTIDRLAGK

SEQ ID NO: 304 - DNA, 1518 bp, Artificial sequence
  2H7 scFv-IgAHiGACH2CH3(T18)
aagcttgccgccatggattttcaagtgcagattttcagcttcctgctaatcagtgcttcagtcataattgccagaggacaaattgttctctcccagtctccagcaatcctgtctgcatctccaggggagaaggtcacaatgacttgcagggccagctcaagtgtaagttacatgcactggtaccagcagaagccaggatcctcccccaaaccctggatttatgccccatccaacctggcttctggagtccctgctcgcttcagtggcagtgggtctgggacctcttactctctcacaatcagcagagtggaggctgaagatgctgccacttattactgccagcagtggagttttaacccacccacgttcggtgctgggaccaagctggagctgaaagatggcggtggctcgggcggtggtggatctggaggaggtgggagctctcaggcttatctacagcagtctggggctgagctggtgaggcctggggcctcagtgaagatgtcctgcaaggcttctggctacacatttaccagttacaatatgcactgggtaaagcagacacctagacagggcctggaatggattggagctatttatccaggaaatggtgatacttcctacaatcagaagttcaagggcaaggccacactgactgtagacaaatcctccagcacagcctacatgcagctcagcagcctgacatctgaagactctgcggtctatttctgtgcaagagtggtgtactatagtaactcttactggtacttcgatgtctggggcacagggaccacggtcaccgtctcttctgatcagccagttccctcaactccacctaccccatctccctcaactccacctaccccatctccctcatgctgccacccccgactgtcactgcaccgaccggccctcgaggacctgctcttaggttcagaagcgatcctcacgtgcacactgaccggcctgagagatgcctcaggtgtcaccttcacctggacgccctcaagtgggaagagcgctgttcaaggaccacctgaccgtgacctctgtggctgctacagcgtgtccagtgtcctgccgggctgtgccgagccatggaaccatgggaagaccttcacttgcactgctgcctaccccgagtccaagaccccgctaaccgccaccctctcaaaatccggaaacacattccggcccgaggtccacctgctgccgccgccgtcggaggagctggccctgaacgagctggtgacgctgacgtgcctggcacgtggcttcagccccaaggatgtgctggttcgctggctgcaggggtcacaggagctgccccgcgagaagtacctgacttgggcatcccggcaggagcccagccagggcaccaccaccttcgctgtgaccagcatactgcgcgtggcagccgaggactggaagaagggggacaccttctcctgcatggtgggccacgaggccctgccgctggccttcacacagaagaccatcgaccgcttggcgggtaaa

SEQ ID NO: 305 - protein, 502 aa, Artificial sequence
  2H7 scFv-IgAHIgACH2CH3(T18)
MDFQVQIFSFLLISASVIIARGQIVLSQSPAILSASPGEKVTMTCRASSSVSYMHWYQQKPGSSPKPWIYAPSNLASGVPARFSGSGSGTSYSLTISRVEAEDAATYYCQQWSFNPPTFGAGTKLELKDGGGSGGGGSGGGGSSQAYLQQSGAELVRPGASVKMSCKASGYTFTSYNMHWVKQTPRQGLEWIGAIYPGNGDTSYNQKFKGKATLTVDKSSSTAYMQLSSLTSEDSAVYFCARVVYYSNSYWYFDVWGTGTTVTVSSDQPVPSTPPTPSPSTPPTPSPSCCHPRLSLHRPALEDLLLGSEAILTCTLTGLRDASGVTFTWTPSSGKSAVQGPPDRDLCGCYSVSSVLPGCAEPWNHGKTFTCTAAYPESKTPLTATLSKSGNTFRPEVHLLPPPSEELALNELVTLTCLARGFSPKDVLVRWLQGSQELPREKYLTWASRQEPSQGTTTFAVTSILRVAAEDWKKGDTFSCMVGHEALPLAFTQKTIDRLAGK

SEQ ID NO: 306 - DNA, 924 bp, Artificial sequence
  CTLA4IgG1-wTHWTCH2CH3
gcaacctacatgatggggaatgagttgaccttcctagatgattccatctgcacgggcacctccagtggaaatcaagtgaacctcactatccaaggactgagggccatggacacgggactctacatctgcaaggtggagctcatgtacccaccgccatactacctgggcataggcaacggaacccagatttatgtaattgatccagaaccgtgcccagattctgatcaacccaaatcttgtgacaaaactcacacatgcccaccgtgcccagcacctgaactcctggggggaccgtcagtcttcctcttccccccaaaacccaaggacaccctcatgatctcccggacccctgaggtcacatgcgtggtggtggacgtgagccacgaagaccctgaggtcaagttcaactggtacgtggacggcgtggaggtgcataatgccaagacaaagccgcgggaggagcagtacaacagcacgtaccgtgtggtcagcgtcctcaccgtcctgcaccaggactggctgaatggcaaggagtacaagtgcaaggtctccaacaaagccctcccagcccccatcgagaaaacaatctccaaagccaaagggcagccccgagaaccacaggtgtacaccctgcccccatcccgggatgagctgaccaagaaccaggtcagcctgacctgcctggtcaaaggcttctatcccagcgacatcgccgtggagtgggagagcaatgggcagccggagaacaactacaagaccacgcctcccgtgctggactccgacggctccttcttcctctacagcaagctcaccgtggacaagagcaggtggcagcaggggaacgtcttctcatgctccgtgatgcatgaggctctgcacaaccactacacgcagaagagcctctccctgtctccgggtaaatga

SEQ ID NO: 307 - protein, 382 aa, Artificial sequence
  Fusion polypeptide
MGVLLTQRTLLSLVLALLFPSMASMAMHVAQPAVVLASSRGIASFVCEYASPGKATEVRVTVLRQADSQVTEVCAATYMMGNELTFLDDSICTGTSSGNQVNLTIQGLRAMDTGLYICKVELMYPPPYYLGIGNGTQIYVIDPEPCPDSDQPKSCDKTHTCPPCPAPELLGGPSVFLFPPKPKDTLMISRTPEVTCVVVDVSHEDPEVKFNWYVDGVEVHNAKTKPREEQYNSTYRVVSVLTVLHQDWLNGKEYKCKVSNKALPAPIEKTISKAKGQPREPQVYTLPPSRDELTKNQVSLTCLVKGFYPSDIAVEWESNGQPENNYKTTPPVLDSDGSFFLYSKLTVDKSRWQQGNVFSCSVMHEALHNHYTQKSLSLSPGK

SEQ ID NO: 308 - DNA, 453 bp, Artificial sequence
  EC domain CTLA4
atgggggtactgctcacacagaggacgctgctcagtctggtccttgcactcctgtttccaagcatggcgagcatggcaatgcacgtggcccagcctgctgtggtactggccagcagccgaggcatcgccagctttgtgtgtgagtatgcatctccaggcaaagccactgaggtccgggtgacagtgcttcggcaggctgacagccaggtgactgaagtctgtgcggcaacctacatgatggggaatgagttgaccttcctagatgattccatctgcacgggcacctccagtggaaatcaagtgaacctcactatccaaggactgagggccatggacacgggactctacatctgcaaggtggagctcatgtacccaccgccatactacctgggcataggcaacggaacccagatttatgtaattgatccagaaccgtgcccagattctgatcaa

SEQ ID NO: 309 - protein, 151 aa, Artificial sequence
  EC domain CTLA4
MGVLLTQRTLLSLVLALLFPSMASMAMHVAQPAVVLASSRGIASFVCEYASPGKATEVRVTVLRQADSQVTEVCAATYMMGNELTFLDDSICTGTSSGNQVNLTIQGLRAMDTGLYICKVELMYPPPYYLGIGNGTQIYVIDPEPCPDSDQ

SEQ ID NO: 310 - DNA, 51 bp, Artificial sequence
  5' oligo for engineering 14 amino acids from IgA-T4
gttgttgatcagccagttccctcaactccacctaccccatctccctcaact

SEQ ID NO: 311 - DNA, 75 bp, Artificial sequence
  Fusion polynucleotide
atgggggtactgctcacacagaggacgctgctcagtctggtccttgcactcctgtttccaagcatggcgagcatg

SEQ ID NO: 312 - protein, 22 aa, Artificial sequence
  Fusion polypeptide
MGVLLTQRTLLSLVLALLFPSM

SEQ ID NO: 313 - DNA, 372 bp, Artificial sequence
  Fusion polynucleotide
gcaatgcacgtggcccagcctgctgtggtactggccagcagccgaggcatcgccagctttgtgtgtgagtatgcatctccaggcaaagccactgaggtccgggtgacagtgcttcggcaggctgacagccaggtgactgaagtctgtgcggcaacctacatgacggggaatgagttgaccttcctagatgattccatctgcacgggcacctccagtggaaatcaagtgaacctcactatccaaggactgagggccatggacacgggactctacatctgcaaggtggagctcatgtacccaccgccatactacctgggcataggcaacggaacccagatttatgtaattgatccagaaccgtgcccagattct

SEQ ID NO: 314 - protein, 124 aa, Artificial sequence
  Fusion polypeptide
AMHVAQPAVVLASSRGIASFVCEYASPGKATEVRVTVLRQADSQVTEVCAATYMTGNELTFLDDSICTGTSSGNQVNLTIQGLRAMDTGLYICKVELMYPPPYYLGIGNGTQIYVIDPEPCPDS

SEQ ID NO: 315 - DNA, 1149 bp, Artificial sequence
  CTLA4-IgG MTH (SSS) MTCH2WTCH3
atgggggtactgctcacacagaggacgctgctcagtctggtccttgcactcctgtttccaagcatggcgagcatggcaatgcacgtggcccagcctgctgtggtactggccagcagccgaggcatcgccagctttgtgtgtgagtatgcatctccaggcaaagccactgaggtccgggtgacagtgcttcggcaggctgacagccaggtgactgaagtctgtgcggcaacctacatgatggggaatgagttgaccttcctagatgattccatctgcacgggcacctccagtggaaatcaagtgaacctcactatccaaggactgagggccatggacacgggactctacatctgcaaggtggagctcatgtacccaccgccatactacctgggcataggcaacggaacccagatttatgtaattgatccagaaccgtgcccagattctgatcaacccaaatcttctgacaaaactcacacatccccaccgtccccagcacctgaactcctggggggatcgtcagtcttcctcttccccccaaaacccaaggacaccctcatgatctcccggacccctgaggtcacatgcgtggtggtggacgtgagccacgaagaccctgaggtcaagttcaactggtacgtggacggcgtggaggtgcataatgccaagacaaagccgcgggaggagcagtacaacagcacgtaccgtgtggtcagcgtcctcaccgtcctgcaccaggactggctgaatggcaaggagtacaagtgcaaggtctccaacaaagccctcccagcccccatcgagaaaacaatctccaaagccaaagggcagccccgagaaccacaggtgtacaccctgcccccatcccgggatgagctgaccaagaaccaggtcagcctgacctgcctggtcaaaggcttctatcccagcgacatcgccgtggagtgggagagcaatgggcagccggagaacaactacaagaccacgcctcccgtgctggactccgacggctccttcttcctctacagcaagctcaccgtggacaagagcaggtggcagcaggggaacgtcttctcatgctccgtgatgcatgaggctctgcacaaccactacacgcagaagagcctctccctgtctccgggtaaatga

SEQ ID NO: 316 - protein, 382 aa, Artificial sequence
  CTLA-4 IgG MTH (SSS) MTCH2WTCH3
MGVLLTQRTLLSLVLALLFPSMASMAMHVAQPAVVLASSRGIASFVCEYASPGKATEVRVTVLRQADSQVTEVCAATYMMGNELTFLDDSICTGTSSGNQVNLTIQGLRAMDTGLYICKVELMYPPPYYLGIGNGTQIYVIDPEPCPDSDQPKSSDKTHTSPPSPAPELLGGSSVFLFPPKPKDTLMISRTPEVTCVVVDVSHEDPEVKFNWYVDGVEVHNAKTKPREEQYNSTYRVVSVLTVLHQDWLNGKEYKCKVSNKALPAPIEKTISKAKGQPREPQVYTLPPSRDELTKNQVSLTCLVKGFYPSDIAVEWESNGQPENNYKTTPPVLDSDGSFFLYSKLTVDKSRWQQGNVFSCSVMHEALHNHYTQKSLSLSPGK

SEQ ID NO: 317 - DNA, 1221 bp, Artificial sequence
  CTLA-4 IgAH IgACH2CH3-FL
atgggggtactgctcacacagaggacgctgctcagtctggtccttgcactcctgtttccaagcatggcgagcatggcaatgcacgtggcccagcctgctgtggtactggccagcagccgaggcatcgccagctttgtgtgtgagtatgcatctccaggcaaagccactgaggtccgggtgacagtgcttcggcaggctgacagccaggtgactgaagtctgtgcggcaacctacatgatggggaatgagttgaccttcctagatgattccatctgcacgggcacctccagtggaaatcaagtgaacctcactatccaaggactgagggccatggacacgggactctacatctgcaaggtggagctcatgtacccaccgccatactacctgggcataggcaacggaacccagatttatgtaattgatccagaaccgtgcccagattctgatcagccagttccctcaactccacctaccccatctccctcaactccacctaccccatctccctcatgctgccacccccgactgtcactgcaccgaccggccctcgaggacctgctcttaggttcagaagcgatcctcacgtgcacactgaccggcctgagagatgcctcaggtgtcaccttcacctggacgccctcaagtgggaagagcgctgttcaaggaccacctgaccgtgacctctgtggctgctacagcgtgtccagtgtcctgccgggctgtgccgagccatggaaccatgggaagaccttcacttgcactgctgcctaccccgagtccaagaccccgctaaccgccaccctctcaaaatccggaaacacattccggcccgaggtccacctgctgccgccgccgtcggaggagctggccctgaacgagctggtgacgctgacgtgcctggcacgtggcttcagccccaaggatgtgctggttcgctggctgcaggggtcacaggagctgccccgcgagaagtacctgacttgggcatcccggcaggagcccagccagggcaccaccaccttcgctgtgaccagcatactgcgcgtggcagccgaggactggaagaagggggacaccttctcctgcatggtgggccacgaggccctgccgctggccttcacacagaagaccatcgaccgcttggcgggtaaacccacccatgtcaatgtgtctgttgtcatggcggaggtggacggcacctgctactgataatctaga

SEQ ID NO: 318 - protein, 403 aa, Artificial sequence
  CTLA-4 IgAH IgACH2CH3-FL
MGVLLTQRTLLSLVLALLFPSMASMAMHVAQPAVVLASSRGIASFVCEYASPGKATEVRVTVLRQADSQVTEVCAATYMMGNELTFLDDSICTGTSSGNQVNLTIQGLRAMDTGLYICKVELMYPPPYYLGIGNGTQIYVIDPEPCPDSDQPVPSTPPTPSPSTPPTPSPSCCHPRLSLHRPALEDLLLGSEAILTCTLTGLRDASGVTFTWTPSSGKSAVQGPPDRDLCGCYSVSSVLPGCAEPWNHGKTFTCTAAYPESKTPLTATLSKSGNTFRPEVHLLPPPSEELALNELVTLTCLARGFSPKDVLVRWLQGSQELPREKYLTWASRQEPSQGTTTFAVTSILRVAAEDWKKGDTFSCMVGHEALPLAFTQKTIDRLAGKPTHVNVSVVMAEVDGTCY

SEQ ID NO: 319 - DNA, 1209 bp, Artificial sequence
  CTLA-4 IgAH IgACH2CH3-T4
atgggggtactgctcacacagaggacgctgctcagtctggtccttgcactcctgtttccaagcatggcgagcatggcaatgcacgtggcccagcctgctgtggtactggccagcagccgaggcatcgccagctttgtgtgtgagtatgcatctccaggcaaagccactgaggtccgggtgacagtgcttcggcaggctgacagccaggtgactgaagtctgtgcggcaacctacatgatggggaatgagttgaccttcctagatgattccatctgcacgggcacctccagtggaaatcaagtgaacctcactatccaaggactgagggccatggacacgggactctacatctgcaaggtggagctcatgtacccaccgccatactacctgggcataggcaacggaacccagatttatgtaattgatccagaaccgtgcccagattctgatcagccagttccctcaactccacctaccccatctccctcaactccacctaccccatctccctcatgctgccacccccgactgtcactgcaccgaccggccctcgaggacctgctcttaggttcagaagcgatcctcacgtgcacactgaccggcctgagagatgcctcaggtgtcaccttcacctggacgccctcaagtgggaagagcgctgttcaaggaccacctgaccgtgacctctgtggctgctacagcgtgtccagtgtcctgccgggctgtgccgagccatggaaccatgggaagaccttcacttgcactgctgcctaccccgagtccaagaccccgctaaccgccaccctctcaaaatccggaaacacattccggcccgaggtccacctgctgccgccgccgtcggaggagctggccctgaacgagctggtgacgctgacgtgcctggcacgtggcttcagccccaaggatgtgctggttcgctggctgcaggggtcacaggagctgccccgcgagaagtacctgacttgggcatcccggcaggagcccagccagggcaccaccaccttcgctgtgaccagcatactgcgcgtggcagccgaggactggaagaagggggacaccttctcctgcatggtgggccacgaggccctgccgctggccttcacacagaagaccatcgaccgcttggcgggtaaacccacccatgtcaatgtgtctgttgtcatggcggaggtggactgataatctaga

SEQ ID NO: 320 - protein, 399 aa, Artificial sequence
  CTLA-4 IgAH IgACH2CH3-T4
MGVLLTQRTLLSLVLALLFPSMASMAMHVAQPAVVLASSRGIASFVCEYASPGKATEVRVTVLRQADSQVTEVCAATYMMGNELTFLDDSICTGTSSGNQVNLTIQGLRAMDTGLYICKVELMYPPPYYLGIGNGTQIYVIDPEPCPDSDQPVPSTPPTPSPSTPPTPSPSCCHPRLSLHRPALEDLLLGSEAILTCTLTGLRDASGVTFTWTPSSGKSAVQGPPDRDLCGCYSVSSVLPGCAEPWNHGKTFTCTAAYPESKTPLTATLSKSGNTFRPEVHLLPPPSEELALNELVTLTCLARGFSPKDVLVRWLQGSQELPREKYLTWASRQEPSQGTTTFAVTSILRVAAEDWKKGDTFSCMVGHEALPLAFTQKTIDRLAGKPTHVNVSVVMAEVD

SEQ ID NO: 321 - DNA, 328 bp, Artificial sequence
  Fusion polynucleotide
cctgaactcctggggggatcgtcagtcttcctcttccccccaaaacccaaggacaccctcatgatctcccggacccctgaggtcacatgcgtggtggtggacgtgagccacgaagaccctgaggtcaagttcaactggtacgtggacggcgtggaggtgcataatgccaagacaaagccgcgggaggagcagtacaacagcacgtaccgtgtggtcagcgtcctcaccgtcctgcaccaggactggctgaatggcaaggagtacaagtgcaaggtctccaacaaagccctcccagcccccatcgagaaaaccatctccaaagccaaag

SEQ ID NO: 322 - protein, 109 aa, Artificial sequence
  Fusion polypeptide
PELLGGSSVFLFPPKPKDTLMISRTPEVTCVVVDVSHEDPEVKFNWYVDGVEVHNAKTKPREEQYNSTYRVVSVLTVLHQDWLNGKEYKCKVSNKALPAPIEKTISKAK

SEQ ID NO: 323 - protein, 10 aa, Artificial sequence
  Amino acids surrounding the proline at 238
PAPELLGGPS

SEQ ID NO: 324 - protein, 10 aa, Artificial sequence
  Amino acid substitution of Serine for Proline at 238
PAPELLGGSS

SEQ ID NO: 325 - DNA, 35 bp, Artificial sequence
  5' oligo to PCR IgE Fc
gttgttgatcacgtctgctccagggacttcacccc

SEQ ID NO: 326 - DNA, 49 bp, Artificial sequence
  3' oligo to PCR IgE Fc
gttgtttctagattaacttttaccgggatttacagacaccgctcgctgg

SEQ ID NO: 327 - DNA, 51 bp, Artificial sequence
  Oligo to provide open reading frame at carboxy end of CH4 to read into transmembrane and cytoplasmic tail of another protein
gttgttttcgaaggatccgctttaccgggatttacagacaccgctcgctgg

SEQ ID NO: 328 - DNA, 996 bp, Artificial sequence
  Fusion polynucleotide
tgatcacgtctgctccagggacttcaccccgcccaccgtgaagatcttacagtcgtcctgcgacggcggcgggcacttccccccgaccatccagctcctgtgcctcgtctctgggtacaccccagggactatcaacatcacctggctggaggacgggcaggtcatggacgtggacttgtccaccgcctctaccacgcaggagggtgagctggcctccacacaaagcgagctcaccctcagccagaagcactggctgtcagaccgcacctacacctgccaggtcacctatcaaggtcacacctttgaggacagcaccaagaagtgtgcagattccaacccgagaggggtgagcgcctacctaagccggcccagcccgttcgacctgttcatccgcaagtcgcccacgatcacctgtctggtggtggacctggcacccagcaaggggaccgtgaacctgacctggtcccgggccagtgggaagcctgtgaaccactccaccagaaaggaggagaagcagcgcaatggcacgttaaccgtcacgtccaccctgccggtgggcacccgagactggatcgagggggagacctaccagtgcagggtgacccacccccacctgcccagggccctcatgcggtccacgaccaagaccagcggcccgcgtgctgccccggaagtctatgcgtttgcgacgccggagtggccggggagccgggacaagcgcaccctcgcctgcctgatccagaacttcatgcctgaggacatctcggtgcagtggctgcacaacgaggtgcagctcccggacgcccggcacagcacgacgcagccccgcaagaccaagggctccggcttcttcgtcttcagccgcctggaggtgaccagggccgaatgggagcagaaagatgagttcatctgccgtgcagtccatgaggcagcgagcccctcacagaccgtccagcgagcggtgtctgtaaatcccggtaaagcggatccttcgaa

SEQ ID NO: 329 - protein, 331 aa, Artificial sequence
  Human IgE Fc with ORF 3'
DHVCSRDFTPPTVKILQSSCDGGGHFPPTIQLLCLVSGYTPGTINITWLEDGQVMDVDLSTASTTQEGELASTQSELTLSQKHWLSDRTYTCQVTYQGHTFEDSTKKCADSNPRGVSAYLSRPSPFDLFIRKSPTITCLVVDLAPSKGTVNLTWSRASGKPVNHSTRKEEKQRNGTLTVTSTLPVGTRDWIEGETYQCRVTHPHLPRALMRSTTKTSGPRAAPEVYAFATPEWPGSRDKRTLACLIQNFMPEDISVQWLHNEVQLPDARHSTTQPRKTKGSGFFVFSRLEVTRAEWEQKDEFICRAVHEAASPSQTVQRAVSVNPGKADPS

SEQ ID NO: 330 - DNA, 63 bp, Artificial sequence
  Fusion polynucleotides
gttgtttgatcaggagcccaaatcttgtgacaaaactcacacatgcccaccgtgcccagcacc

SEQ ID NO: 331 - DNA, 52 bp, Artificial sequence; identical to SEQ ID NO: 278
  Fusion polynucleotides

SEQ ID NO: 332 - DNA, 91 bp, Artificial sequence
  Fusion polynucleotides
gttgttgatcaggagcccaaatcttctgacaaaactcacacatctccaccgtccccagcacctgaactcctgggtggaccgtcagtcttcc

SEQ ID NO: 333 - DNA, 1800 bp, Artificial sequence
  2H7 scFv-human IgE Fc
aagcttgccgccatggattttcaagtgcagattttcagcttcctgctaatcagtgcttcagtcataattgccagaggacaaattgttctctcccagtctccagcaatcctgtctgcatctccaggggagaaggtcacaatgacttgcagggccagctcaagtgtaagttacatgcactggtaccagcagaagccaggatcctcccccaaaccctggatttatgccccatccaacctggcttctggagtccctgctcgcttcagtggcagtgggtctgggacctcttactctctcacaatcagcagagtggaggctgaagatgctgccacttattactgccagcagtggagttttaacccacccacgttcggtgctgggaccaagctggagctgaaaggtggcggtggctcgggcggtggtggatctggaggaggtgggagctctcaggcttatctacagcagtctggggctgagctggtgaggcctggggcctcagtgaagatgtcctgcaaggcttctggctacacatttaccagttacaatatgcactgggtaaagcagacacctagacagggcctggaatggattggagctatttatccaggaaatggtgatacttcctacaatcagaagttcaagggcaaggccacactgactgtagacaaatcctccagcacagcctacatgcagctcagcagcctgacatctgaagactctgcggtctatttctgtgcaagagtggtgtactatagtaactcttactggtacttcgatgtctggggcacagggaccacggtcaccgtctctgatcacgtctgctccagggacttcaccccgcccaccgtgaagatcttacagtcgtcctgcgacggcggcgggcacttccccccgaccatccagctcctgtgcctcgtctctgggtacaccccagggactatcaacatcacctggctggaggacgggcaggtcatggacgtggacttgtccaccgcctctaccacgcaggagggtgagctggcctccacacaaagcgagctcaccctcagccagaagcactggctgtcagaccgcacctacacctgccaggtcacctatcaaggtcacacctttgaggacagcaccaagaagtgtgcagattccaacccgagaggggtgagcgcctacctaagccggcccagcccgttcgacctgttcatccgcaagtcgcccacgatcacctgtctggtggtggacctggcacccagcaaggggaccgtgaacctgacctggtcccgggccagtgggaagcctgtgaaccactccaccagaaaggaggagaagcagcgcaatggcacgttaaccgtcacgtccaccctgccggtgggcacccgagactggatcgagggggagacctaccagtgcagggtgacccacccccacctgcccagggccctcatgcggtccacgaccaagaccagcggcccgcgtgctgccccggaagtctatgcgtttgcgacgccggagtggccggggagccgggacaagcgcaccctcgcctgcctgatccagaacttcatgcctgaggacatctcggtgcagtggctgcacaacgaggtgcagctcccggacgcccggcacagcacgacgcagccccgcaagaccaagggctccggcttcttcgtcttcagccgcctggaggtgaccagggccgaatgggagcagaaagatgagttcatctgccgtgcagtccatgaggcagcgagcccctcacagaccgtccagcgagcggtgtctgtaaatcccggtaaatgataatctaga

SEQ ID NO: 334 - protein, 592 aa, Artificial sequence
  2H7 scFv-human IgE Fc
MDFQVQIFSFLLISASVIIARGQIVLSQSPAILSASPGEKVTMTCRASSSVSYMHWYQQKPGSSPKPWIYAPSNLASGVPARFSGSGSGTSYSLTISRVEAEDAATYYCQQWSFNPPTFGAGTKLELKGGGGSGGGGSGGGGSSQAYLQQSGAELVRPGASVKMSCKASGYTFTSYNMHWVKQTPRQGLEWIGAIYPGNGDTSYNQKFKGKATLTVDKSSSTAYMQLSSLTSEDSAVYFCARVVYYSNSYWYFDVWGTGTTVTVSDHVCSRDFTPPTVKILQSSCDGGGHFPPTIQLLCLVSGYTPGTINITWLEDGQVMDVDLSTASTTQEGELASTQSELTLSQKHWLSDRTYTCQVTYQGHTFEDSTKKCADSNPRGVSAYLSRPSPFDLFIRKSPTITCLVVDLAPSKGTVNLTWSRASGKPVNHSTRKEEKQRNGTLTVTSTLPVGTRDWIEGETYQCRVTHPHLPRALMRSTTKTSGPRAAPEVYAFATPEWPGSRDKRTLACLIQNFMPEDISVQWLHNEVQLPDARHSTTQPRKTKGSGFFVFSRLEVTRAEWEQKDEFICRAVHEAASPSQTVQRAVSVNPGK

SEQ ID NO: 335 - DNA, 339 bp, Artificial sequence
  VH region-1D8 anti-mouse 4-1BB
caggtgcagctgaaggaggcaggacctggcctggtgcaaccgacacagaccctgtccctcacatgcactgtctctgggttctcattaaccagcgatggtgtacactggattcgacagcctccaggaaagggtctggaatggatgggaataatatattatgatggaggcacagattataattcagcaattaaatccagactgagcatcagcagggacacctccaagagccaagttttcttaaaaatcaacagtctgcaaactgatgacacagccatgtattactgtgccagaatccactttgattactggggccaaggagtcatggtcacagtctcctct

SEQ ID NO: 336 - DNA, 321 bp, Artificial sequence
  VL region-1D8 anti-mouse 4-1BB
gacattgtgctcactcagtctccaacaaccatagctgcatctccaggggagaaggtcaccatcacctgccgtgccagctccagtgtaagttacatgtactggtaccagcagaagtcaggcgcctcccctaaactctggatttatgacacatccaagctggcttctggagttccaaatcgcttcagtggcagtgggtctgggacctcttattctctcgcaatcaacaccatggagactgaagatgctgccacttattactgtcagcagtggagtagtactccgctcacgttcgggtctgggaccaagctggagatcaaacgg

SEQ ID NO: 337 - DNA, 785 bp, Artificial sequence
  1D8 anti-mouse 4-1 BB scFv
aagcttatggattttcaagtgcagattttcagcttcctgctaatcagtgcttcagtcataatgtccagaggagtcgacattgtgctcactcagtctccaacaaccatagctgcatctccaggggagaaggtcaccatcacctgccgtgccagctccagtgtaagttacatgtactggtaccagcagaagtcaggcgcctcccctaaactctggatttatgacacatccaagctggcttctggagttccaaatcgcttcagtggcagtgggtctgggacctcttattctctcgcaatcaacaccatggagactgaagatgctgccacttattactgtcagcagtggagtagtactccgctcacgttcgggtctgggaccaagctggagatcaaacggggtggcggtggctcgggcggtggtgggtcgggtggcggcggatctcaggtgcagctgaaggaggcaggacctggcctggtgcaaccgacacagaccctgtccctcacatgcactgtctctgggttctcattaaccagcgatggtgtacactggattcgacagcctccaggaaagggtctggaatggatgggaataatatattatgatggaggcacagattataattcagcaattaaatccagactgagcatcagcagggacacctccaagagccaagttttcttaaaaatcaacagtctgcaaactgatgacacagccatgtattactgtgccagaatccactttgattactggggccaaggagtcatggtcacagtctcctctgatca

SEQ ID NO: 338 - DNA, 1491 bp, Artificial sequence
  1D8 scFvhIgG1-WTHWTCH2CH3
aagcttatggattttcaagtgcagattttcagcttcctgctaatcagtgcttcagtcataatgtccagaggagtcgacattgtgctcactcagtctccaacaaccatagctgcatctccaggggagaaggtcaccatcacctgccgtgccagctccagtgtaagttacatgtactggtaccagcagaagtcaggcgcctcccctaaactctggatttatgacacatccaagctggcttctggagttccaaatcgcttcagtggcagtgggtctgggacctcttattctctcgcaatcaacaccatggagactgaagatgctgccacttattactgtcagcagtggagtagtactccgctcacgttcgggtctgggaccaagctggagatcaaacggggtggcggtggctcgggcggtggtgggtcgggtggcggcggatctcaggtgcagctgaaggaggcaggacctggcctggtgcaaccgacacagaccctgtccctcacatgcactgtctctgggttctcattaaccagcgatggtgtacactggattcgacagcctccaggaaagggtctggaatggatgggaataatatattatgatggaggcacagattataattcagcaattaaatccagactgagcatcagcagggacacctccaagagccaagttttcttaaaaatcaacagtctgcaaactgatgacacagccatgtattactgtgccagaatccactttgattactggggccaaggagtcatggtcacagtctcctctgatcaggagcccaaatcttgtgacaaaactcacacatgcccaccgtgcccagcacctgaactcctggggggaccgtcagtcttcctcttccccccaaaacccaaggacaccctcatgatctcccggacccctgaggtcacatgcgtggtggtggacgtgagccacgaagaccctgaggtcaagttcaactggtacgtggacggcgtggaggtgcataatgccaagacaaagccgcgggaggagcagtacaacagcacgtaccgtgtggtcagcgtcctcaccgtcctgcaccaggactggctgaatggcaaggagtacaagtgcaaggtctccaacaaagccctcccagcccccatcgagaaaacaatctccaaagccaaagggcagccccgagaaccacaggtgtacaccctgcccccatcccgggatgagctgaccaagaaccaggtcagcctgacctgcctggtcaaaggcttctatcccagcgacatcgccgtggagtgggagagcaatgggcagccggagaacaactacaagaccacgcctcccgtgctggactccgacggctccttcttcctctacagcaagctcaccgtggacaagagcaggtggcagcaggggaacgtcttctcatgctccgtgatgcatgaggctctgcacaaccactacacgcagaagagcctctccctgtctccgggtaaatgatctaga

SEQ ID NO: 339 - DNA, 1585 bp, Artificial sequence
  Fusion polynucleotide
atgtccagaggagtcgacattgtgctcactcagtctccaacaaccatagctgcatctccaggggagaaggtcaccatcacctgccgtgccagctccagtgtaagttacatgtactggtaccagcagaagtcaggcgcctcccctaaactctggatttatgacacatccaagctggcttctggagttccaaatcgcttcagtggcagtgggtctgggacctcttattctctcgcaatcaacaccatggagactgaagatgctgccacttattactgtcagcagtggagtagtactccgctcacgttcgggtctgggaccaagctggagatcaaacggggtggcggtggctcgggcggtggtgggtcgggtggcggcggatctcaggtgcagctgaaggaggcaggacctggcctggtgcaaccgacacagaccctgtccctcacatgcactgtctctgggttctcattaaccagcgatggtgtacactggattcgacagcctccaggaaagggtctggaatggatgggaataatatattatgatggaggcacagattataattcagcaattaaatccagactgagcatcagcagggacacctccaagagccaagttttcttaaaaatcaacagtctgcaaactgatgacacagccatgtattactgtgccagaatccactttgattactggggccaaggagtcatggtcacagtctcctctgatctggagcccaaatcttctgacaaaactcacacaagcccaccgagcccagcacctgaactcctggggggatcgtcagtcttcctcttccccccaaaacccaaggacaccctcatgatctcccggacccctgaggtcacatgcgtggtggtggacgtgagccacgaagaccctgaggtcaagttcaactggtacgtggacggcgtggaggtgcataatgccaagacaaagccgcgggaggagcagtacaacagcacgtaccgtgtggtcagcgtcctcaccgtcctgcaccaggactggctgaatggcaaggagtacaagtgcaaggtctccaacaaagccctcccagcccccatcgagaaaaccatctccaaagccaaagggcagccccgagaaccacaggtgtacaccctgcccccatcccgggatgagctgaccaagaaccaggtcagcctgacctgcctggtcaaaggcttctatcccagcgacatcgccgtggagtgggagagcaatgggcagccggagaacaactacaagaccacgcctcccgtgctggactccgacggctccttcttcctctacagcaagctcaccgtggacaagagcaggtggcagcaggggaacgtcttctcatgctccgtgatgcatgaggctctgcacaaccactacacgcagaagagcctctccctgtctccgggtaaagcggatccttcgaacctgctcccatcctgggccattaccttaatctcagtaaatggaatttttgtgatatgctgcctgacctactgctttgccccaagatgcagagagagaaggaggaatgagagattgagaagggaaagtgtacgccctgtataaatcgata

SEQ ID NO: 340 - DNA, 1645 bp, Artificial sequence
  1D8 (anti-murine 40-1BB) scFv IgG WTH WTCH2CH3-CD80
aagcttatggattttcaagtgcagattttcagcttcctgctaatcagtgcttcagtcataatgtccagaggagtcgacattgtgctcactcagtctccaacaaccatagctgcatctccaggggagaaggtcaccatcacctgccgtgccagctccagtgtaagttacatgtactggtaccagcagaagtcaggcgcctcccctaaactctggatttatgacacatccaagctggcttctggagttccaaatcgcttcagtggcagtgggtctgggacctcttattctctcgcaatcaacaccatggagactgaagatgctgccacttattactgtcagcagtggagtagtactccgctcacgttcgggtctgggaccaagctggagatcaaacggggtggcggtggctcgggcggtggtgggtcgggtggcggcggatctcaggtgcagctgaaggaggcaggacctggcctggtgcaaccgacacagaccctgtccctcacatgcactgtctctgggttctcattaaccagcgatggtgtacactggattcgacagcctccaggaaagggtctggaatggatgggaataatatattatgatggaggcacagattataattcagcaattaaatccagactgagcatcagcagggacacctccaagagccaagttttcttaaaaatcaacagtctgcaaactgatgacacagccatgtattactgtgccagaatccactttgattactggggccaaggagtcatggtcacagtctcctctgatctggagcccaaatcttgtgacaaaactcacacatgcccaccgtgcccagcacctgaactcctggggggaccgtcagtcttcctcttccccccaaaacccaaggacaccctcatgatctcccggacccctgaggtcacatgcgtggtggtggacgtgagccacgaagaccctgaggtcaagttcaactggtacgtggacggcgtggaggtgcataatgccaagacaaagccgcgggaggagcagtacaacagcacgtaccgtgtggtcagcgtcctcaccgtcctgcaccaggactggctgaatggcaaggagtacaagtgcaaggtctccaacaaagccctcccagcccccatcgagaaaaccatctccaaagccaaagggcagccccgagaaccacaggtgtacaccctgcccccatcccgggatgagctgaccaagaaccaggtcagcctgacctgcctggtcaaaggcttctatcccagcgacatcgccgtggagtgggagagcaatgggcagccggagaacaactacaagaccacgcctcccgtgctggactccgacggctccttcttcctctacagcaagctcaccgtggacaagagcaggtggcagcaggggaacgtcttctcatgctccgtgatgcatgaggctctgcacaaccactacacgcagaagagcctctccctgtctccgggtaaagcggatccttcgaacctgctcccatcctgggccattaccttaatctcagtaaatggaatttttgtgatatgctgcctgacctactgctttgccccaagatgcagagagagaaggaggaatgagagattgagaagggaaagtgtacgccctgtataaatcgata

SEQ ID NO: 341 - protein, 113 aa, Artificial sequence
  VH region-1D8 anti-mouse 4-1BB
QVQLKEAGPGLVQPTQTLSLTCTVSGFSLTSDGVHWIRQPPGKGLEWMGIIYYDGGTDYNSAIKSRLSISRDTSKSQVFLKINSLQTDDTAMYYCARIHFDYWGQGVMVTVSS

SEQ ID NO: 342 - protein, 107 aa, Artificial sequence
  VL region-1D8 anti-mouse 4-1BB
DIVLTQSPTTIAASPGEKVTITCRASSSVSYMYWYQQKSGASPKLWIYDTSKLASGVPNRFSGSGSGTSYSLAINTMETEDAATYYCQQWSSTPLTFGSGTKLEIKR

SEQ ID NO: 343 - protein, 258 aa, Artificial sequence
  1D8 anti-mouse 4-1BB scFv
MDFQVQIFSFLLISASVIMSRGVDIVLTQSPTTIAASPGEKVTITCRASSSVSYMYWYQQKSGASPKLWIYDTSKLASGVPNRFSGSGSGTSYSLAINTMETEDAATYYCQQWSSTPLTFGSGTKLEIKRGGGGSGGGGSGGGGSQVQLKEAGPGLVQPTQTLSLTCTVSGFSLTSDGVHWIRQPPGKGLEWMGIIYYDGGTDYNSAIKSRLSISRDTSKSQVFLKINSLQTDDTAMYYCARIHFDYWGQGVMVTVSS

SEQ ID NO: 344 - protein, 492 aa, Artificial sequence
  1D8 scFvhIgG1-WTHWTCH2CH3
MDFQVQIFSFLLISASVIMSRGVDIVLTQSPTTIAASPGEKVTITCRASSSVSYMYWYQQKSGASPKLWIYDTSKLASGVPNRFSGSGSGTSYSLAINTMETEDAATYYCQQWSSTPLTFGSGTKLEIKRGGGGSGGGGSGGGGSQVQLKEAGPGLVQPTQTLSLTCTVSGFSLTSDGVHWIRQPPGKGLEWMGIIYYDGGTDYNSAIKSRLSISRDTSKSQVFLKINSLQTDDTAMYYCARIHFDYWGQGVMVTVSSDQEPKSCDKTHTCPPCPAPELLGGPSVFLFPPKPKDTLMISRTPEVTCVVVDVSHEDPEVKFNWYVDGVEVHNAKTKPREEQYNSTYRVVSVLTVLHQDWLNGKEYKCKVSNKALPAPIEKTISKAKGQPREPQVYTLPPSRDELTKNQVSLTCLVKGFYPSDIAVEWESNGQPENNYKTTPPVLDSDGSFFLYSKLTVDKSRWQQGNVFSCSVMHEALHNHYTQKSLSLSPGK

SEQ ID NO: 345 - protein, 543 aa, Artificial sequence
  1D8 (anti-murine 4-1BB) scFv IgG WTH WTCH2CH3-CD80
MDFQVQIFSFLLISASVIMSRGVDIVLTQSPTTIAASPGEKVTITCRASSSVSYMYWYQQKSGASPKLWIYDTSKLASGVPNRFSGSGSGTSYSLAINTMETEDAATYYCQQWSSTPLTFGSGTKLEIKRGGGGSGGGGSGGGGSQVQLKEAGPGLVQPTQTLSLTCTVSGFSLTSDGVHWIRQPPGKGLEWMGIIYYDGGTDYNSAIKSRLSISRDTSKSQVFLKINSLQTDDTAMYYCARIHFDYWGQGVMVTVSSDLEPKSCDKTHTCPPCPAPELLGGPSVFLFPPKPKDTLMISRTPEVTCVVVDVSHEDPEVKFNWYVDGVEVHNAKTKPREEQYNSTYRVVSVLTVLHQDWLNGKEYKCKVSNKALPAPIEKTISKAKGQPREPQVYTLPPSRDELTKNQVSLTCLVKGFYPSDIAVEWESNGQPENNYKTTPPVLDSDGSFFLYSKLTVDKSRWQQGNVFSCSVMHEALHNHYTQKSLSLSPGKADPSNLLPSWAITLISVNGIFVICCLTYCFAPRCRERRRNERLRRESVRPV

SEQ ID NO: 346 - protein, 543 aa, Artificial sequence
  1D8 (anti-murine 4-1BB) scFv IgG MH (SSS) MCH2-WTCH3-CD80
MDFQVQIFSFLLISASVIMSRGVDIVLTQSPTTIAASPGEKVTITCRASSSVSYMYWYQQKSGASPKLWIYDTSKLASGVPNRFSGSGSGTSYSLAINTMETEDAATYYCQQWSSTPLTFGSGTKLEIKRGGGGSGGGGSGGGGSQVQLKEAGPGLVQPTQTLSLTCTVSGFSLTSDGVHWIRQPPGKGLEWMGIIYYDGGTDYNSAIKSRLSISRDTSKSQVFLKINSLQTDDTAMYYCARIHFDYWGQGVMVTVSSDLEPKSSDKTHTSPPSPAPELLGGSSVFLFPPKPKDTLMISRTPEVTCVVVDVSHEDPEVKFNWYVDGVEVHNAKTKPREEQYNSTYRVVSVLTVLHQDWLNGKEYKCKVSNKALPAPIEKTISKAKGQPREPQVYTLPPSRDELTKNQVSLTCLVKGFYPSDIAVEWESNGQPENNYKTTPPVLDSDGSFFLYSKLTVDKSRWQQGNVFSCSVMHEALHNHYTQKSLSLSPGKADPSNLLPSWAITLISVNGIFVICCLTYCFAPRCRERRRNERLRRESVRPV

SEQ ID NO: 347 - DNA, 1527 bp, Artificial sequence
  G19-4 (anti-human CD3) scFv-hIgG1WTHWTCH2WTCH3
aagcttatggattttcaagtgcagattttcagcttcctgctaatcagtgcttcagtcataatgtccagaggagtcgacatccagatgacacagactacatcctccctgtctgcctctctgggagacagagtcaccatcagttgcagggcaagtcaggacattcgcaattatttaaactggtatcagcagaaaccagatggaactgttaaactcctgatctactacacatcaagattacactcaggagtcccatcaaggttcagtggcagtgggtctggaacagattattctctcaccattgccaacctgcaaccagaagatattgccacttacttttgccaacagggtaatacgcttccgtggacgttcggtggaggcaccaaactggtaaccaaacgggagctcggtggcggtggctcgggcggtggtgggtcgggtggcggcggatctatcgatgaggtccagctgcaacagtctggacctgaactggtgaagcctggagcttcaatgtcctgcaaggcctctggttactcattcactggctacatcgtgaactggctgaagcagagccatggaaagaaccttgagtggattggacttattaatccatacaaaggtcttactacctacaaccagaaattcaagggcaaggccacattaactgtagacaagtcatccagcacagcctacatggagctcctcagtctgacatctgaagactctgcagtctattactgtgcaagatctgggtactatggtgactcggactggtacttcgatgtctggggcgcagggaccacggtcaccgtctcctctgatcaggagcccaaatcttgtgacaaaactcacacatgcccaccgtgcccagcacctgaactcctggggggaccgtcagtcttcctcttccccccaaaacccaaggacaccctcatgatctcccggacccctgaggtcacatgcgtggtggtggacgtgagccacgaagaccctgaggtcaagttcaactggtacgtggacggcgtggaggtgcataatgccaagacaaagccgcgggaggagcagtacaacagcacgtaccgtgtggtcagcgtcctcaccgtcctgcaccaggactggctgaatggcaaggagtacaagtgcaaggtctccaacaaagccctcccagcccccatcgagaaaacaatctccaaagccaaagggcagccccgagaaccacaggtgtacaccctgcccccatcccgggatgagctgaccaagaaccaggtcagcctgacctgcctggtcaaaggcttctatcccagcgacatcgccgtggagtgggagagcaatgggcagccggagaacaactacaagaccacgcctcccgtgctggactccgacggctccttcttcctctacagcaagctcaccgtggacaagagcaggtggcagcaggggaacgtcttctcatgctccgtgatgcatgaggctctgcacaaccactacacgcagaagagcctctccctgtctccgggtaaatgatctaga

SEQ ID NO: 348 - protein, 504 aa, Artificial sequence
  G19-4 (anti-human CD3) scFv-hIgG1WTHWTCH2WTCH3
MDFQVQIFSFLLISASVIMSRGVDIQMTQTTSSLSASLGDRVTISCRASQDIRNYLNWYQQKPDGTVKLLIYYTSRLHSGVPSRFSGSGSGTDYSLTIANLQPEDIATYFCQQGNTLPWTFGGGTKLVTKRELGGGGSGGGGSGGGGSIDEVQLQQSGPELVKPGASMSCKASGYSFTGYIVNWLKQSHGKNLEWIGLINPYKGLTTYNQKFKGKATLTVDKSSSTAYMELLSLTSEDSAVYYCARSGYYGDSDWYFDVWGAGTTVTVSSDQEPKSCDKTHTCPPCPAPELLGGPSVFLFPPKPKDTLMISRTPEVTCVVVDVSHEDPEVKFNWYVDGVEVHNAKTKPREEQYNSTYRVVSVLTVLHQDWLNGKEYKCKVSNKALPAPIEKTISKAKGQPREPQVYTLPPSRDELTKNQVSLTCLVKGFYPSDIAVEWESNGQPENNYKTTPPVLDSDGSFFLYSKLTVDKSRWQQGNVFSCSVMHEALHNHYTQKSLSLSPGK

SEQ ID NO: 349 - DNA, 2325 bp, Artificial sequence
  anti-CD20-anti-CD40 scFv IgG MTH (SSS) MTCH2WTCH3
aagcttgccgccatggattttcaagtgcagattttcagcttcctgctaatcagtgcttcagtcataattgccagaggacaaattgttctctcccagtctccagcaatcctgtctgcatctccaggggagaaggtcacaatgacttgcagggccagctcaagtgtaagttacatgcactggtaccagcagaagccaggatcctcccccaaaccctggatttatgccccatccaacctggcttctggagtccctgctcgcttcagtggcagtgggtctgggacctcttactctctcacaatcagcagagtggaggctgaagatgctgccacttattactgccagcagtggagttttaacccacccacgttcggtgctgggaccaagctggagctgaaaggtggcggtggctcgggcggtggtggatctggaggaggtgggagctctcaggcttatctacagcagtctggggctgagctggtgaggcctggggcctcagtgaagatgtcctgcaaggcttctggctacacatttaccagttacaatatgcactgggtaaagcagacacctagacagggcctggaatggattggagctatttatccaggaaatggtgatacttcctacaatcagaagttcaagggcaaggccacactgactgtagacaaatcctccagcacagcctacatgcagctcagcagcctgacatctgaagactctgcggtctatttctgtgcaagagtggtgtactatagtaactcttactggtacttcgatgtctggggcacagggaccacggtcaccgtctcttctgatcaatccaactctgaagaagcaaagaaagaggaggccaaaaaggaggaagccaagaaatctaacagcgtcgacattgttctgactcagtctccagccaccctgtctgtgactccaggagatagagtctctctttcctgcagggccagccagagtattagcgactacttacactggtatcaacaaaaatcacatgagtctccaaggcttctcatcaaatatgcttcccattccatctctgggatcccctccaggttcagtggcagtggatcagggtcagatttcactctcagtatcaacagtgtggaacctgaagatgttggaatttattactgtcaacatggtcacagctttccgtggacgttcggtggaggcaccaagctggaaatcaaacggggtggcggtggctcgggcggaggtgggtcgggtggcggcggatctcagatccagttggtgcaatctggacctgagctgaagaagcctggagagacagtcaggatctcctgcaaggcttctgggtatgccttcacaactactggaatgcagtgggtgcaagagatgccaggaaagggtttgaagtggattggctggataaacaccccactctggagtgccaaaatatgtagaagacttcaaggacggtttgccttctctttggaaacctctgccaacactgcatatttacagataagcaacctcaaagatgaggacacggctacgtatttctgtgtgagatccgggaatggtaactatgacctggcctactttgcttactggggccaagggacactggtcactgtctctgatcaggagcccaaatcttctgacaaaactcacacatccccaccgtccccagcacctgaactcctggggggatcgtcagtcttcctcttccccccaaaacccaaggacaccctcatgatctcccggacccctgaggtcacatgcgtggtggtggacgtgagccacgaagaccctgaggtcaagttcaactggtacgtggacggcgtggaggtgcataatgccaagacaaagccgcgggaggagcagtacaacagcacgtaccgtgtggtcagcgtcctcaccgtcctgcaccaggactggctgaatggcaaggagtacaagtgcaaggtctccaacaaagccctcccagcccccatcgagaaaacaatctccaaagccaaagggcagccccgagaaccacaggtgtacaccctgcccccatcccgggatgagctgaccaagaaccaggtcagcctgacctgcctggtcaaaggcttctatcccagcgacatcgccgtggagtgggagagcaatgggcagccggagaacaactacaagaccacgcctcccgtgctggactccgacggctccttcttcctctacagcaagctcaccgtggacaagagcaggtggcagcaggggaacgtcttctcatgctccgtgatgcatgaggctctgcacaaccactacacgcagaagagcctctccctgtctccgggtaaatgatctaga

SEQ ID NO: 350 - protein, 768 aa, Artificial sequence
  anti-CD20-anti-CD40 scFv IgG MTH (SSS) MTCH2WTCH3
MDFQVQIFSFLLISASVIIARGQIVLSQSPAILSASPGEKVTMTCRASSSVSYMHWYQQKPGSSPKPWIYAPSNLASGVPARFSGSGSGTSYSLTISRVEAEDAATYYCQQWSFNPPTFGAGTKLELKGGGGSGGGGSGGGGSSQAYLQQSGAELVRPGASVKMSCKASGYTFTSYNMHWVKQTPRQGLEWIGAIYPGNGDTSYNQKFKGKATLTVDKSSSTAYMQLSSLTSEDSAVYFCARVVYYSNSYWYFDVWGTGTTVTVSSDQSNSEEAKKEEAKKEEAKKSNSVDIVLTQSPATLSVTPGDRVSLSCRASQSISDYLHWYQQKSHESPRLLIKYASHSISGIPSRFSGSGSGSDFTLSINSVEPEDVGIYYCQHGHSFPWTFGGGTKLEIKRGGGGSGGGGSGGGGSQIQLVQSGPELKKPGETVRISCKASGYAFTTTGMQWVQEMPGKGLKWIGWINTPLWSAKICRRLQGRFAFSLETSANTAYLQISNLKDEDTATYFCVRSGNGNYDLAYFAYWGQGTLVTVSDQEPKSSDKTHTSPPSPAPELLGGSSVFLFPPKPKDTLMISRTPEVTCVVVDVSHEDPEVKFNWYVDGVEVHNAKTKPREEQYNSTYRVVSVLTVLHQDWLNGKEYKCKVSNKALPAPIEKTISKAKGQPREPQVYTLPPSRDELTKNQVSLTCLVKGFYPSDIAVEWESNGQPENNYKTTPPVLDSDGSFFLYSKLTVDKSRWQQGNVFSCSVMHEALHNHYTQKSLSLSPGK

SEQ ID NO: 351 - DNA, 1521 bp, Artificial sequence
  L6 scFv hIgG1 MH (SSS) MCH2 WT CH3
aagcttgccgccatggattttcaagtgcagattttcagcttcctgctaatcagtgcttcagtcataattgccagaggacaaattgttctctcccagtctccagcaatcctgtctgcatctccaggggagaaggtcacaatgacttgcagggccagctcaagtgtaagttacatgcactggtaccagcagaagccaggatcctcccccaaaccctggatttatgccccatccaacctggcttctggagtccctgctcgcttcagtggcagtgggtctgggacctcttactctctcacaatcagcagagtggaggctgaagatgctgccacttattactgccagcagtggagttttaacccacccacgttcggtgctgggaccaagctggagctgaaagatggcggtggctcgggcggtggtggatctggaggaggtgggagctctcaggcttatctacagcagtctggggctgagctggtgaggcctggggcctcagtgaagatgtcctgcaaggcttctggctacacatttaccagttacaatatgcactgggtaaagcagacacctagacagggcctggaatggattggagctatttatccaggaaatggtgatacttcctacaatcagaagttcaagggcaaggccacactgactgtagacaaatcctccagcacagcctacatgcagctcagcagcctgacatctgaagactctgcggtctatttctgtgcaagagtggtgtactatagtaactcttactggtacttcgatgtctggggcacagggaccacggtcaccgtctcttctgatcaggagcccaaatcttctgacaaaactcacacatccccaccgtccccagcacctgaactcctggggggatcgtcagtcttcctcttccccccaaaacccaaggacaccctcatgatctcccggacccctgaggtcacatgcgtggtggtggacgtgagccacgaagaccctgaggtcaagttcaactggtacgtggacggcgtggaggtgcataatgccaagacaaagccgcgggaggagcagtacaacagcacgtaccgtgtggtcagcgtcctcaccgtcctgcaccaggactggctgaatggcaaggagtacaagtgcaaggtctccaacaaagccctcccagcccccatcgagaaaacaatctccaaagccaaagggcagccccgagaaccacaggtgtacaccctgcccccatcccgggatgagctgaccaagaaccaggtcagcctgacctgcctggtcaaaggcttctatcccagcgacatcgccgtggagtgggagagcaatgggcagccggagaacaactacaagaccacgcctcccgtgctggactccgacggctccttcttcctctacagcaagctcaccgtggacaagagcaggtggcagcaggggaacgtcttctcatgctccgtgatgcatgaggctctgcacaaccactacacgcagaagagcctctccctgtctccgggtaaatgatctaga

SEQ ID NO: 352 - protein, 500 aa, Artificial sequence
  L6 scFv hIgG1 MH (SSS) MCH2 WT CH3
MDFQVQIFSFLLISASVIIARGQIVLSQSPAILSASPGEKVTMTCRASSSVSYMHWYQQKPGSSPKPWIYAPSNLASGVPARFSGSGSGTSYSLTISRVEAEDAATYYCQQWSFNPPTFGAGTKLELKDGGGSGGGGSGGGGSSQAYLQQSGAELVRPGASVKMSCKASGYTFTSYNMHWVKQTPRQGLEWIGAIYPGNGDTSYNQKFKGKATLTVDKSSSTAYMQLSSLTSEDSAVYFCARVVYYSNSYWYFDVWGTGTTVTVSSDQEPKSSDKTHTSPPSPAPELLGGSSVFLFPPKPKDTLMISRTPEVTCVVVDVSHEDPEVKFNWYVDGVEVHNAKTKPREEQYNSTYRVVSVLTVLHQDWLNGKEYKCKVSNKALPAPIEKTISKAKGQPREPQVYTLPPSRDELTKNQVSLTCLVKGFYPSDIAVEWESNGQPENNYKTTPPVLDSDGSFFLYSKLTVDKSRWQQGNVFSCSVMHEALHNHYTQKSLSLSPGK

SEQ ID NO: 353 - DNA, 423 bp, Artificial sequence
  5B9-anti-human 4-1BB VH with leader
atggctgtcttggggctgctcttctgcctggtgacatttccaagctgtgtcctatcccaggtgcagctgaagcagtcaggacctggcctagtgcagtcctcacagagcctgtccatcacctgcacagtctctggtttctcattaactacctatgctgtacactgggttcgccagtctccaggaaagggtctggagtggctgggagtgatatggagtggtggaatcacagactataatgcagctttcatatccagactgagcatcaccaaggacgattccaagagccaagttttctttaaaatgaacagtctgcaacctaatgacacagccatttattactgtgccagaaatgggggtgataactacccttattactatgctatggactactggggtcaaggaacctcagtcaccgtctcctca

SEQ ID NO: 354 - DNA, 366 bp, Artificial sequence
  5B9-anti-human 4-1BB VH
caggtgcagctgaagcagtcaggacctggcctagtgcagtcctcacagagcctgtccatcacctgcacagtctctggtttctcattaactacctatgctgtacactgggttcgccagtctccaggaaagggtctggagtggctgggagtgatatggagtggtggaatcacagactataatgcagctttcatatccagactgagcatcaccaaggacgattccaagagccaagttttctttaaaatgaacagtctgcaacctaatgacacagccatttattactgtgccagaaatgggggtgataactacccttattactatgctatggactactggggtcaaggaacctcagtcaccgtctcctca

SEQ ID NO: 355 - DNA, 399 bp, Artificial sequence
  5B9-anti-human 4-1BB VL
atgaggttctctgctcagcttctggggctgcttgtgctctggatccctggatccactgcagatattgtgatgacgcaggctgcattctccaatccagtcactcttggaacatcagcttccatctcctgcaggtctagtaagagtctcctacatagtaatggcatcacttatttgtattggtatctgcagaagccaggccagtctcctcagctcctgatttatcagatgtccaaccttgcctcaggagtcccagacaggttcagtagcagtgggtcaggaactgatttcacactgagaatcagcagagtggaggctgaggatgtgggtgtttattactgtgctcaaaatctagaacttccgctcacgttcggtgctgggaccaagctggagctgaaacgg

SEQ ID NO: 356 - DNA, 825 bp, Artificial sequence
  5B9-anti-human 4-1BB scFv
aagcttgccgccatgaggttctctgctcagcttctggggctgcttgtgctctggatccctggatccactgcagatattgtgatgacgcaggctgcattctccaatccagtcactcttggaacatcagcttccatctcctgcaggtctagtaagagtctcctacatagtaatggcatcacttatttgtattggtatctgcagaagccaggccagtctcctcagctcctgatttatcagatgtccaaccttgcctcaggagtcccagacaggttcagtagcagtgggtcaggaactgatttcacactgagaatcagcagagtggaggctgaggatgtgggtgtttattactgtgctcaaaatctagaacttccgctcacgttcggtgctgggaccaagctggagctgaaacggggtggcggtggctcgggcggtggtgggtcgggtggcggcggatcgtcacaggtgcagctgaagcagtcaggacctggcctagtgcagtcctcacagagcctgtccatcacctgcacagtctctggtttctcattaactacctatgctgtacactgggttcgccagtctccaggaaagggtctggagtggctgggagtgatatggagtggtggaatcacagactataatgcagctttcatatccagactgagcatcaccaaggacgattccaagagccaagttttctttaaaatgaacagtctgcaacctaatgacacagccatttattactgtgccagaaatgggggtgataactacccttattactatgctatggactactggggtcaaggaacctcagtcaccgtctcctct

SEQ ID NO: 357 - DNA, 1536 bp, Artificial sequence
  5B9 scFv IgG MTH (SSS) WTCH2CH3
aagcttgccgccatgaggttctctgctcagcttctggggctgcttgtgctctggatccctggatccactgcagatattgtgatgacgcaggctgcattctccaatccagtcactcttggaacatcagcttccatctcctgcaggtctagtaagagtctcctacatagtaatggcatcacttatttgtattggtatctgcagaagccaggccagtctcctcagctcctgatttatcagatgtccaaccttgcctcaggagtcccagacaggttcagtagcagtgggtcaggaactgatttcacactgagaatcagcagagtggaggctgaggatgtgggtgtttattactgtgctcaaaatctagaacttccgctcacgttcggtgctgggaccaagctggagctgaaacggggtggcggtggctcgggcggtggtgggtcgggtggcggcggatcgtcacaggtgcagctgaagcagtcaggacctggcctagtgcagtcctcacagagcctgtccatcacctgcacagtctctggtttctcattaactacctatgctgtacactgggttcgccagtctccaggaaagggtctggagtggctgggagtgatatggagtggtggaatcacagactataatgcagctttcatatccagactgagcatcaccaaggacgattccaagagccaagttttctttaaaatgaacagtctgcaacctaatgacacagccatttattactgtgccagaaatgggggtgataactacccttattactatgctatggactactggggtcaaggaacctcagtcaccgtctcctctgatcaggagcccaaatcttctgacaaaactcacacatccccaccgtccccagcacctgaactcctggggggaccgtcagtcttcctcttccccccaaaacccaaggacaccctcatgatctcccggacccctgaggtcacatgcgtggtggtggacgtgagccacgaagaccctgaggtcaagttcaactggtacgtggacggcgtggaggtgcataatgccaagacaaagccgcgggaggagcagtacaacagcacgtaccgtgtggtcagcgtcctcaccgtcctgcaccaggactggctgaatggcaaggagtacaagtgcaaggtctccaacaaagccctcccagcccccatcgagaaaacaatctccaaagccaaagggcagccccgagaaccacaggtgtacaccctgcccccatcccgggatgagctgaccaagaaccaggtcagcctgacctgcctggtcaaaggcttctatcccagcgacatcgccgtggagtgggagagcaatgggcagccggagaacaactacaagaccacgcctcccgtgctggactccgacggctccttcttcctctacagcaagctcaccgtggacaagagcaggtggcagcaggggaacgtcttctcatgctccgtgatgcatgaggctctgcacaaccactacacgcagaagagcctctccctgtctccgggtaaatgatctaga

SEQ ID NO: 358 - DNA, 1696 bp, Artificial sequence
  5B9-anti-human 4-1BB scFvhIgG1 MH (SSS) MCH2 WTCH3-CD80
aagcttgccgccatgaggttctctgctcagcttctggggctgcttgtgctctggatccctggatccactgcagatattgtgatgacgcaggctgcattctccaatccagtcactcttggaacatcagcttccatctcctgcaggtctagtaagagtctcctacatagtaatggcatcacttatttgtattggtatctgcagaagccaggccagtctcctcagctcctgatttatcagatgtccaaccttgcctcaggagtcccagacaggttcagtagcagtgggtcaggaactgatttcacactgagaatcagcagagtggaggctgaggatgtgggtgtttattactgtgctcaaaatctagaacttccgctcacgttcggtgctgggaccaagctggagctgaaacggggtggcggtggctcgggcggtggtgggtcgggtggcggcggatcgtcacaggtgcagctgaagcagtcaggacctggcctagtgcagtcctcacagagcctgtccatcacctgcacagtctctggtttctcattaactacctatgctgtacactgggttcgccagtctccaggaaagggtctggagtggctgggagtgatatggagtggtggaatcacagactataatgcagctttcatatccagactgagcatcaccaaggacgattccaagagccaagttttctttaaaatgaacagtctgcaacctaatgacacagccatttattactgtgccagaaatgggggtgataactacccttattactatgctatggactactggggtcaaggaacctcagtcaccgtctcctctgatctggagcccaaatcttctgacaaaactcacacaagcccaccgagcccagcacctgaactcctggggggatcgtcagtcttcctcttccccccaaaacccaaggacaccctcatgatctcccggacccctgaggtcacatgcgtggtggtggacgtgagccacgaagaccctgaggtcaagttcaactggtacgtggacggcgtggaggtgcataatgccaagacaaagccgcgggaggagcagtacaacagcacgtaccgtgtggtcagcgtcctcaccgtcctgcaccaggactggctgaatggcaaggagtacaagtgcaaggtctccaacaaagccctcccagcccccatcgagaaaaccatctccaaagccaaagggcagccccgagaaccacaggtgtacaccctgcccccatcccgggatgagctgaccaagaaccaggtcagcctgacctgcctggtcaaaggcttctatcccagcgacatcgccgtggagtgggagagcaatgggcagccggagaacaactacaagaccacgcctcccgtgctggactccgacggctccttcttcctctacagcaagctcaccgtggacaagagcaggtggcagcaggggaacgtcttctcatgctccgtgatgcatgaggctctgcacaaccactacacgcagaagagcctctccctgtctccgggtaaagcggatccttcgaacctgctcccatcctgggccattaccttaatctcagtaaatggaatttttgtgatatgctgcctgacctactgctttgccccaagatgcagagagagaaggaggaatgagagattgagaagggaaagtgtacgccctgtataaatcgatactcgag

SEQ ID NO: 359 - protein, 141 aa, Artificial sequence
  5B9-anti-human 4-1BB VH with leader
MAVLGLLFCLVTFPSCVLSQVQLKQSGPGLVQSSQSLSITCTVSGFSLTTYAVHWVRQSPGKGLEWLGVIWSGGITDYNAAFISRLSITKDDSKSQVFFKMNSLQPNDTAIYYCARNGGDNYPYYYAMDYWGQGTSVTVSS

SEQ ID NO: 360 - protein, 122 aa, Artificial sequence
  5B9-anti-human 401BB VH
QVQLKQSGPGLVQSSQSLSITCTVSGFSLTTYAVHWVRQSPGKGLEWLGVIWSGGITDYNAAFISRLSITKDDSKSQVFFKMNSLQPNDTAIYYCARNGGDNYPYYYAMDYWGQGTSVTVSS

SEQ ID NO: 361 - protein, 133 aa, Artificial sequence
  5B9-anti-human 4-1BB VL
MRFSAQLLGLLVLWIPGSTADIVMTQAAFSNPVTLGTSASISCRSSKSLLHSNGITYLYWYLQKPGQSPQLLIYQMSNLASGVPDRFSSSGSGTDFTLRISRVEAEDVGVYYCAQNLELPLTFGAGTKLELKR

SEQ ID NO: 362 - protein, 271 aa, Artificial sequence
  5B9-anti-human 4-1BB scFv
MRFSAQLLGLLVLWIPGSTADIVMTQAAFSNPVTLGTSASISCRSSKSLLHSNGITYLYWYLQKPGQSPQLLIYQMSNLASGVPDRFSSSGSGTDFTLRISRVEAEDVGVYYCAQNLELPLTFGAGTKLELKRGGGGSGGGGSGGGGSSQVQLKQSGPGLVQSSQSLSITCTVSGFSLTTYAVHWVRQSPGKGLEWLGVIWSGGITDYNAAFISRLSITKDDSKSQVFFKMNSLQPNDTAIYYCARNGGDNYPYYYAMDYWGQGTSVTVSS

SEQ ID NO: 363 - protein, 505 aa, Artificial sequence
  5B9 scFv IgG MTH (SSS) WTCH2CH3
MRFSAQLLGLLVLWIPGSTADIVMTQAAFSNPVTLGTSASISCRSSKSLLHSNGITYLYWYLQKPGQSPQLLIYQMSNLASGVPDRFSSSGSGTDFTLRISRVEAEDVGVYYCAQNLELPLTFGAGTKLELKRGGGGSGGGGSGGGGSSQVQLKQSGPGLVQSSQSLSITCTVSGFSLTTYAVHWVRQSPGKGLEWLGVIWSGGITDYNAAFISRLSITKDDSKSQVFFKMNSLQPNDTAIYYCARNGGDNYPYYYAMDYWGQGTSVTVSSDQEPKSSDKTHTSPPSPAPELLGGPSVFLFPPKPKDTLMISRTPEVTCVVVDVSHEDPEVKFNWYVDGVEVHNAKTKPREEQYNSTYRVVSVLTVLHQDWLNGKEYKCKVSNKALPAPIEKTISKAKGQPREPQVYTLPPSRDELTKNQVSLTCLVKGFYPSDIAVEWESNGQPENNYKTTPPVLDSDGSFFLYSKLTVDKSRWQQGNVFSCSVMHEALHNHYTQKSLSLSPGK

SEQ ID NO: 364 - protein, 556 aa, Artificial sequence
  5B9-anti-human 4-1BB scFvhIgG1 MH (SSS) MCH2 WTCH3-CD80
MRFSAQLLGLLVLWIPGSTADIVMTQAAFSNPVTLGTSASISCRSSKSLLHSNGITYLYWYLQKPGQSPQLLIYQMSNLASGVPDRFSSSGSGTDFTLRISRVEAEDVGVYYCAQNLELPLTFGAGTKLELKRGGGGSGGGGSGGGGSSQVQLKQSGPGLVQSSQSLSITCTVSGFSLTTYAVHWVRQSPGKGLEWLGVIWSGGITDYNAAFISRLSITKDDSKSQVFFKMNSLQPNDTAIYYCARNGGDNYPYYYAMDYWGQGTSVTVSSDLEPKSSDKTHTSPPSPAPELLGGSSVFLFPPKPKDTLMISRTPEVTCVVVDVSHEDPEVKFNWYVDGVEVHNAKTKPREEQYNSTYRVVSVLTVLHQDWLNGKEYKCKVSNKALPAPIEKTISKAKGQPREPQVYTLPPSRDELTKNQVSLTCLVKGFYPSDIAVEWESNGQPENNYKTTPPVLDSDGSFFLYSKLTVDKSRWQQGNVFSCSVMHEALHNHYTQKSLSLSPGKADPSNLLPSWAITLISVNGIFVICCLTYCFAPRCRERRRNERLRRESVRPV

SEQ ID NO: 365 - DNA, 72 bp, Artificial sequence
  3' oligo CH3 mutant F405Y
gttgttgaagacgttcccctgctgccacctgctcttgtccacggtgagcttgctgtagaggtagaaggagcc

SEQ ID NO: 366 - DNA, 72 bp, Artificial sequence
  3' oligo CH3 mutant F405A
gttgttgaagacgttcccctgctgccacctgctcttgtccacggtgagcttgctgtagagggcgaaggagcc

SEQ ID NO: 367 - DNA, 72 bp, Artificial sequence
  3' oligo CH3 mutant Y407A
gttgttgaagacgttcccctgctgccacctgctcttgtccacggtgagcttgctggcgaggaagaaggagcc

SEQ ID NO: 368 - DNA, 72 bp, Artificial sequence
  3' oligo CH3 mutant F405Y and Y407A
gttgttgaagacgttcccctgctgccacctgctcttgtccacggtgagcttgctggcgaggtagaaggagcc

SEQ ID NO: 369 - DNA, 72 bp, Artificial sequence
  3' oligo CH3 mutant F405A and Y407A
gttgttgaagacgttcccctgctgccacctgctcttgtccacggtgagcttgctggcgagggcgaaggagcc

SEQ ID NO: 370 - DNA, 324 bp, Artificial sequence
  Y405 (F405Y)
gggcagccccgagaaccacaggtgtacaccctgcccccatcccgggaggagatgaccaagaaccaggtcagcctgacctgcctggtcaaaggcttctatcccagcgacatcgccgtggagtgggagagcaatgggcagccggagaacaactacaagaccacgcctcccgtgctggactccgacggctccttctacctctatagcaagctcaccgtggacaagagcaggtggcagcaggggaacgtcttctcatgctccgtgatgcatgaggctctgcacaaccactacacgcagaagagcctctccctgtccccgggtaaatga

SEQ ID NO: 371 - DNA, 324 bp, Artificial sequence
  MTCH3 F405A
gggcagccccgagaaccacaggtgtacaccctgcccccatcccgggaggagatgaccaagaaccaggtcagcctgacctgcctggtcaaaggcttctatcccagcgacatcgccgtggagtgggagagcaatgggcagccggagaacaactacaagaccacgcctcccgtgctggactccgacggctccttcgccctctatagcaagctcaccgtggacaagagcaggtggcagcaggggaacgtcttctcatgctccgtgatgcatgaggctctgcacaaccactacacgcagaagagcctctccctgtccccgggtaaatga

SEQ ID NO: 372 - DNA, 324 bp, Artificial sequence
  A407 (Y407A)
gggcagccccgagaaccacaggtgtacaccctgcccccatcccgggaggagatgaccaagaaccaggtcagcctgacctgcctggtcaaaggcttctatcccagcgacatcgccgtggagtgggagagcaatgggcagccggagaacaactacaagaccacgcctcccgtgctggactccgacggctccttcttcctcgccagcaagctcaccgtggacaagagcaggtggcagcaggggaacgtcttctcatgctccgtgatgcatgaggctctgcacaaccactacacgcagaagagcctctccctgtccccgggtaaatga

SEQ ID NO: 373 - DNA, 324 bp, Artificial sequence
  MTCH3 Y405A407
gggcagccccgagaaccacaggtgtacaccctgcccccatcccgggaggagatgaccaagaaccaggtcagcctgacctgcctggtcaaaggcttctatcccagcgacatcgccgtggagtgggagagcaatgggcagccggagaacaactacaagaccacgcctcccgtgctggactccgacggctccttctacctcgccagcaagctcaccgtggacaagagcaggtggcagcaggggaacgtcttctcatgctccgtgatgcatgaggctctgcacaaccactacacgcagaagagcctctccctgtccccgggtaaatga

SEQ ID NO: 374 - DNA, 324 bp, Artificial sequence
  MTCH3 A405A407
gggcagccccgagaaccacaggtgtacaccctgcccccatcccgggaggagatgaccaagaaccaggtcagcctgacctgcctggtcaaaggcttctatcccagcgacatcgccgtggagtgggagagcaatgggcagccggagaacaactacaagaccacgcctcccgtgctggactccgacggctccttcgccctcgccagcaagctcaccgtggacaagagcaggtggcagcaggggaacgtcttctcatgctccgtgatgcatgaggctctgcacaaccactacacgcagaagagcctctccctgtccccgggtaaatga

SEQ ID NO: 375 - protein, 107 aa, Artificial sequence
  Y405 (F405Y)
GQPREPQVYTLPPSREEMTKNQVSLTCLVKGFYPSDIAVEWESNGQPENNYKTTPPVLDSDGSFYLYSKLTVDKSRWQQGNVFSCSVMHEALHNHYTQKSLSLSPGK

SEQ ID NO: 376 - protein, 107 aa, Artificial sequence
  MTCH3 F405A
GQPREPQVYTLPPSREEMTKNQVSLTCLVKGFYPSDIAVEWESNGQPENNYKTTPPVLDSDGSFALYSKLTVDKSRWQQGNVFSCSVMHEALHNHYTQKSLSLSPGK

SEQ ID NO: 377 - protein, 107 aa, Artificial sequence
  A407 (Y407A)
GQPREPQVYTLPPSREEMTKNQVSLTCLVKGFYPSDIAVEWESNGQPENNYKTTPPVLDSDGSFFLASKLTVDKSRWQQGNVFSCSVMHEALHNHYTQKSLSLSPGK

SEQ ID NO: 378 - protein, 107 aa, Artificial sequence
  MTCH3 Y405A407
GQPREPQVYTLPPSREEMTKNQVSLTCLVKGFYPSDIAVEWESNGQPENNYKTTPPVLDSDGSFYLASKLTVDKSRWQQGNVFSCSVMHEALHNHYTQKSLSLSPGK

SEQ ID NO: 379 - protein, 107 aa, Artificial sequence
  MTCH3 A405A407
GQPREPQVYTLPPSREEMTKNQVSLTCLVKGFYPSDIAVEWESNGQPENNYKTTPPVLDSDGSFALASKLTVDKSRWQQGNVFSCSVMHEALHNHYTQKSLSLSPGK

SEQ ID NO: 380 - DNA, 1515 bp, Artificial sequence
  2H7 scFvIg (SSS) H WTCH2 MCH3 F405A
aagcttgccgccatggattttcaagtgcagattttcagcttcctgctaatcagtgcttcagtcataattgccagaggacaaattgttctctcccagtctccagcaatcctgtctgcatctccaggggagaaggtcacaatgacttgcagggccagctcaagtgtaagttacatgcactggtaccagcagaagccaggatcctcccccaaaccctggatttatgccccatccaacctggcttctggagtccctgctcgcttcagtggcagtgggtctgggacctcttactctctcacaatcagcagagtggaggctgaagatgctgccacttattactgccagcagtggagttttaacccacccacgttcggtgctgggaccaagctggagctgaaagatggcggtggctcgggcggtggtggatctggaggaggtgggagctctcaggcttatctacagcagtctggggctgagctggtgaggcctggggcctcagtgaagatgtcctgcaaggcttctggctacacatttaccagttacaatatgcactgggtaaagcagacacctagacagggcctggaatggattggagctatttatccaggaaatggtgatacttcctacaatcagaagttcaagggcaaggccacactgactgtagacaaatcctccagcacagcctacatgcagctcagcagcctgacatctgaagactctgcggtctatttctgtgcaagagtggtgtactatagtaactcttactggtacttcgatgtctggggcacagggaccacggtcaccgtctcttctgatcaggagcccaaatcttctgacaaaactcacacatccccaccgtccccagcacctgaactcctggggggaccgtcagtcttcctcttccccccaaaacccaaggacaccctcatgatctcccggacccctgaggtcacatgcgtggtggtggacgtgagccacgaagaccctgaggtcaagttcaactggtacgtggacggcgtggaggtgcataatgccaagacaaagccgcgggaggagcagtacaacagcacgtaccgtgtggtcagcgtcctcaccgtcctgcaccaggactggctgaatggcaaggagtacaagtgcaaggtctccaacaaagccctcccagcccccatcgagaaaacaatctccaaagccaaagggcagccccgagaaccacaggtgtacaccctgcccccatcccgggaggagatgaccaagaaccaggtcagcctgacctgcctggtcaaaggcttctatcccagcgacatcgccgtggagtgggagagcaatgggcagccggagaacaactacaagaccacgcctcccgtgctggactccgacggctccttcgccctctatagcaagctcaccgtggacaagagcaggtggcagcaggggaacgtcttctcatgctccgtgatgcatgaggctctgcacaaccactacacgcagaagagcctctccctgtccccgggtaaatga

SEQ ID NO: 381 - DNA, 1521 bp, Artificial sequence
  2H7 scFvIg (SSS) H WTCH2 MCH3 F405Y
aagcttgccgccatggattttcaagtgcagattttcagcttcctgctaatcagtgcttcagtcataattgccagaggacaaattgttctctcccagtctccagcaatcctgtctgcatctccaggggagaaggtcacaatgacttgcagggccagctcaagtgtaagttacatgcactggtaccagcagaagccaggatcctcccccaaaccctggatttatgccccatccaacctggcttctggagtccctgctcgcttcagtggcagtgggtctgggacctcttactctctcacaatcagcagagtggaggctgaagatgctgccacttattactgccagcagtggagttttaacccacccacgttcggtgctgggaccaagctggagctgaaagatggcggtggctcgggcggtggtggatctggaggaggtgggagctctcaggcttatctacagcagtctggggctgagctggtgaggcctggggcctcagtgaagatgtcctgcaaggcttctggctacacatttaccagttacaatatgcactgggtaaagcagacacctagacagggcctggaatggattggagctatttatccaggaaatggtgatacttcctacaatcagaagttcaagggcaaggccacactgactgtagacaaatcctccagcacagcctacatgcagctcagcagcctgacatctgaagactctgcggtctatttctgtgcaagagtggtgtactatagtaactcttactggtacttcgatgtctggggcacagggaccacggtcaccgtctcttctgatcaggagcccaaatcttctgacaaaactcacacatccccaccgtccccagcacctgaactcctggggggaccgtcagtcttcctcttccccccaaaacccaaggacaccctcatgatctcccggacccctgaggtcacatgcgtggtggtggacgtgagccacgaagaccctgaggtcaagttcaactggtacgtggacggcgtggaggtgcataatgccaagacaaagccgcgggaggagcagtacaacagcacgtaccgtgtggtcagcgtcctcaccgtcctgcaccaggactggctgaatggcaaggagtacaagtgcaaggtctccaacaaagccctcccagcccccatcgagaaaacaatctccaaagccaaagggcagccccgagaaccacaggtgtacaccctgcccccatcccgggaggagatgaccaagaaccaggtcagcctgacctgcctggtcaaaggcttctatcccagcgacatcgccgtggagtgggagagcaatgggcagccggagaacaactacaagaccacgcctcccgtgctggactccgacggctccttctacctctatagcaagctcaccgtggacaagagcaggtggcagcaggggaacgtcttctcatgctccgtgatgcatgaggctctgcacaaccactacacgcagaagagcctctccctgtccccgggtaaatgatctaga

SEQ ID NO: 382 - DNA, 1515 bp, Artificial sequence
  2H7 scFvIg (SSS) H WTCH2 MCH3 F405Y Y407A
aagcttgccgccatggattttcaagtgcagattttcagcttcctgctaatcagtgcttcagtcataattgccagaggacaaattgttctctcccagtctccagcaatcctgtctgcatctccaggggagaaggtcacaatgacttgcagggccagctcaagtgtaagttacatgcactggtaccagcagaagccaggatcctcccccaaaccctggatttatgccccatccaacctggcttctggagtccctgctcgcttcagtggcagtgggtctgggacctcttactctctcacaatcagcagagtggaggctgaagatgctgccacttattactgccagcagtggagttttaacccacccacgttcggtgctgggaccaagctggagctgaaagatggcggtggctcgggcggtggtggatctggaggaggtgggagctctcaggcttatctacagcagtctggggctgagctggtgaggcctggggcctcagtgaagatgtcctgcaaggcttctggctacacatttaccagttacaatatgcactgggtaaagcagacacctagacagggcctggaatggattggagctatttatccaggaaatggtgatacttcctacaatcagaagttcaagggcaaggccacactgactgtagacaaatcctccagcacagcctacatgcagctcagcagcctgacatctgaagactctgcggtctatttctgtgcaagagtggtgtactatagtaactcttactggtacttcgatgtctggggcacagggaccacggtcaccgtctcttctgatcaggagcccaaatcttctgacaaaactcacacatccccaccgtccccagcacctgaactcctggggggaccgtcagtcttcctcttccccccaaaacccaaggacaccctcatgatctcccggacccctgaggtcacatgcgtggtggtggacgtgagccacgaagaccctgaggtcaagttcaactggtacgtggacggcgtggaggtgcataatgccaagacaaagccgcgggaggagcagtacaacagcacgtaccgtgtggtcagcgtcctcaccgtcctgcaccaggactggctgaatggcaaggagtacaagtgcaaggtctccaacaaagccctcccagcccccatcgagaaaacaatctccaaagccaaagggcagccccgagaaccacaggtgtacaccctgcccccatcccgggaggagatgaccaagaaccaggtcagcctgacctgcctggtcaaaggcttctatcccagcgacatcgccgtggagtgggagagcaatgggcagccggagaacaactacaagaccacgcctcccgtgctggactccgacggctccttcttcctcgccagcaagctcaccgtggacaagagcaggtggcagcaggggaacgtcttctcatgctccgtgatgcatgaggctctgcacaaccactacacgcagaagagcctctccctgtccccgggtaaatga

SEQ ID NO: 383 - DNA, 1515 bp, Artificial sequence
  2H7 scFvIg (SSS) H WTCH2 MCH3 Y407A
aagcttgccgccatggattttcaagtgcagattttcagcttcctgctaatcagtgcttcagtcataattgccagaggacaaattgttctctcccagtctccagcaatcctgtctgcatctccaggggagaaggtcacaatgacttgcagggccagctcaagtgtaagttacatgcactggtaccagcagaagccaggatcctcccccaaaccctggatttatgccccatccaacctggcttctggagtccctgctcgcttcagtggcagtgggtctgggacctcttactctctcacaatcagcagagtggaggctgaagatgctgccacttattactgccagcagtggagttttaacccacccacgttcggtgctgggaccaagctggagctgaaagatggcggtggctcgggcggtggtggatctggaggaggtgggagctctcaggcttatctacagcagtctggggctgagctggtgaggcctggggcctcagtgaagatgtcctgcaaggcttctggctacacatttaccagttacaatatgcactgggtaaagcagacacctagacagggcctggaatggattggagctatttatccaggaaatggtgatacttcctacaatcagaagttcaagggcaaggccacactgactgtagacaaatcctccagcacagcctacatgcagctcagcagcctgacatctgaagactctgcggtctatttctgtgcaagagtggtgtactatagtaactcttactggtacttcgatgtctggggcacagggaccacggtcaccgtctcttctgatcaggagcccaaatcttctgacaaaactcacacatccccaccgtccccagcacctgaactcctggggggaccgtcagtcttcctcttccccccaaaacccaaggacaccctcatgatctcccggacccctgaggtcacatgcgtggtggtggacgtgagccacgaagaccctgaggtcaagttcaactggtacgtggacggcgtggaggtgcataatgccaagacaaagccgcgggaggagcagtacaacagcacgtaccgtgtggtcagcgtcctcaccgtcctgcaccaggactggctgaatggcaaggagtacaagtgcaaggtctccaacaaagccctcccagcccccatcgagaaaacaatctccaaagccaaagggcagccccgagaaccacaggtgtacaccctgcccccatcccgggaggagatgaccaagaaccaggtcagcctgacctgcctggtcaaaggcttctatcccagcgacatcgccgtggagtgggagagcaatgggcagccggagaacaactacaagaccacgcctcccgtgctggactccgacggctccttctacctcgccagcaagctcaccgtggacaagagcaggtggcagcaggggaacgtcttctcatgctccgtgatgcatgaggctctgcacaaccactacacgcagaagagcctctccctgtccccgggtaaatga

SEQ ID NO: 384 - DNA, 1515 bp, Artificial sequence
  2H7 scFvIg (SSS) H WTCH2 MCH3 F405A Y407A
aagcttgccgccatggattttcaagtgcagattttcagcttcctgctaatcagtgcttcagtcataattgccagaggacaaattgttctctcccagtctccagcaatcctgtctgcatctccaggggagaaggtcacaatgacttgcagggccagctcaagtgtaagttacatgcactggtaccagcagaagccaggatcctcccccaaaccctggatttatgccccatccaacctggcttctggagtccctgctcgcttcagtggcagtgggtctgggacctcttactctctcacaatcagcagagtggaggctgaagatgctgccacttattactgccagcagtggagttttaacccacccacgttcggtgctgggaccaagctggagctgaaagatggcggtggctcgggcggtggtggatctggaggaggtgggagctctcaggcttatctacagcagtctggggctgagctggtgaggcctggggcctcagtgaagatgtcctgcaaggcttctggctacacatttaccagttacaatatgcactgggtaaagcagacacctagacagggcctggaatggattggagctatttatccaggaaatggtgatacttcctacaatcagaagttcaagggcaaggccacactgactgtagacaaatcctccagcacagcctacatgcagctcagcagcctgacatctgaagactctgcggtctatttctgtgcaagagtggtgtactatagtaactcttactggtacttcgatgtctggggcacagggaccacggtcaccgtctcttctgatcaggagcccaaatcttctgacaaaactcacacatccccaccgtccccagcacctgaactcctggggggaccgtcagtcttcctcttccccccaaaacccaaggacaccctcatgatctcccggacccctgaggtcacatgcgtggtggtggacgtgagccacgaagaccctgaggtcaagttcaactggtacgtggacggcgtggaggtgcataatgccaagacaaagccgcgggaggagcagtacaacagcacgtaccgtgtggtcagcgtcctcaccgtcctgcaccaggactggctgaatggcaaggagtacaagtgcaaggtctccaacaaagccctcccagcccccatcgagaaaacaatctccaaagccaaagggcagccccgagaaccacaggtgtacaccctgcccccatcccgggaggagatgaccaagaaccaggtcagcctgacctgcctggtcaaaggcttctatcccagcgacatcgccgtggagtgggagagcaatgggcagccggagaacaactacaagaccacgcctcccgtgctggactccgacggctccttcgccctcgccagcaagctcaccgtggacaagagcaggtggcagcaggggaacgtcttctcatgctccgtgatgcatgaggctctgcacaaccactacacgcagaagagcctctccctgtccccgggtaaatga

SEQ ID NO: 385 - protein, 500 aa, Artificial sequence
  2H7 scFvIg (SSS)H WTCH2 MCH3 F405A
MDFQVQIFSFLLISASVIIARGQIVLSQSPAILSASPGEKVTMTCRASSSVSYMHWYQQKPGSSPKPWIYAPSNLASGVPARFSGSGSGTSYSLTISRVEAEDAATYYCQQWSFNPPTFGAGTKLELKDGGGSGGGGSGGGGSSQAYLQQSGAELVRPGASVKMSCKASGYTFTSYNMHWVKQTPRQGLEWIGAIYPGNGDTSYNQKFKGKATLTVDKSSSTAYMQLSSLTSEDSAVYFCARVVYYSNSYWYFDVWGTGTTVTVSSDQEPKSSDKTHTSPPSPAPELLGGPSVFLFPPKPKDTLMISRTPEVTCVVVDVSHEDPEVKFNWYVDGVEVHNAKTKPREEQYNSTYRVVSVLTVLHQDWLNGKEYKCKVSNKALPAPIEKTISKAKGQPREPQVYTLPPSREEMTKNQVSLTCLVKGFYPSDIAVEWESNGQPENNYKTTPPVLDSDGSFALYSKLTVDKSRWQQGNVFSCSVMHEALHNHYTQKSLSLSPGK

SEQ ID NO: 386 - protein, 500 aa, Artificial sequence
  2H7 scFvIg (SSS)H WTCH2 MCH3 F405Y
MDFQVQIFSFLLISASVIIARGQIVLSQSPAILSASPGEKVTMTCRASSSVSYMHWYQQKPGSSPKPWIYAPSNLASGVPARFSGSGSGTSYSLTISRVEAEDAATYYCQQWSFNPPTFGAGTKLELKDGGGSGGGGSGGGGSSQAYLQQSGAELVRPGASVKMSCKASGYTFTSYNMHWVKQTPRQGLEWIGAIYPGNGDTSYNQKFKGKATLTVDKSSSTAYMQLSSLTSEDSAVYFCARVVYYSNSYWYFDVWGTGTTVTVSSDQEPKSSDKTHTSPPSPAPELLGGPSVFLFPPKPKDTLMISRTPEVTCVVVDVSHEDPEVKFNWYVDGVEVHNAKTKPREEQYNSTYRVVSVLTVLHQDWLNGKEYKCKVSNKALPAPIEKTISKAKGQPREPQVYTLPPSREEMTKNQVSLTCLVKGFYPSDIAVEWESNGQPENNYKTTPPVLDSDGSFYLYSKLTVDKSRWQQGNVFSCSVMHEALHNHYTQKSLSLSPGK

SEQ ID NO: 387 - protein, 500 aa, Artificial sequence
  2H7 scFvIg (SSS)H WTCH2 MCH3 Y407A
MDFQVQIFSFLLISASVIIARGQIVLSQSPAILSASPGEKVTMTCRASSSVSYMHWYQQKPGSSPKPWIYAPSNLASGVPARFSGSGSGTSYSLTISRVEAEDAATYYCQQWSFNPPTFGAGTKLELKDGGGSGGGGSGGGGSSQAYLQQSGAELVRPGASVKMSCKASGYTFTSYNMHWVKQTPRQGLEWIGAIYPGNGDTSYNQKFKGKATLTVDKSSSTAYMQLSSLTSEDSAVYFCARVVYYSNSYWYFDVWGTGTTVTVSSDQEPKSSDKTHTSPPSPAPELLGGPSVFLFPPKPKDTLMISRTPEVTCVVVDVSHEDPEVKFNWYVDGVEVHNAKTKPREEQYNSTYRVVSVLTVLHQDWLNGKEYKCKVSNKALPAPIEKTISKAKGQPREPQVYTLPPSREEMTKNQVSLTCLVKGFYPSDIAVEWESNGQPENNYKTTPPVLDSDGSFFLASKLTVDKSRWQQGNVFSCSVMHEALHNHYTQKSLSLSPGK

SEQ ID NO: 388 - protein, 500 aa, Artificial sequence
  2H7 scFvIg (SSS) H WTCH2 MCH3 F405Y Y407A
MDFQVQIFSFLLISASVIIARGQIVLSQSPAILSASPGEKVTMTCRASSSVSYMHWYQQKPGSSPKPWIYAPSNLASGVPARFSGSGSGTSYSLTISRVEAEDAATYYCQQWSFNPPTFGAGTKLELKDGGGSGGGGSGGGGSSQAYLQQSGAELVRPGASVKMSCKASGYTFTSYNMHWVKQTPRQGLEWIGAIYPGNGDTSYNQKFKGKATLTVDKSSSTAYMQLSSLTSEDSAVYFCARVVYYSNSYWYFDVWGTGTTVTVSSDQEPKSSDKTHTSPPSPAPELLGGPSVFLFPPKPKDTLMISRTPEVTCVVVDVSHEDPEVKFNWYVDGVEVHNAKTKPREEQYNSTYRVVSVLTVLHQDWLNGKEYKCKVSNKALPAPIEKTISKAKGQPREPQVYTLPPSREEMTKNQVSLTCLVKGFYPSDIAVEWESNGQPENNYKTTPPVLDSDGSFYLASKLTVDKSRWQQGNVFSCSVMHEALHNHYTQKSLSLSPGK

SEQ ID NO: 389 - protein, 500 aa, Artificial sequence
  2H7 scFvIg (SSS) H WTCH2 MCH3 F405A Y407A
MDFQVQIFSFLLISASVIIARGQIVLSQSPAILSASPGEKVTMTCRASSSVSYMHWYQQKPGSSPKPWIYAPSNLASGVPARFSGSGSGTSYSLTISRVEAEDAATYYCQQWSFNPPTFGAGTKLELKDGGGSGGGGSGGGGSSQAYLQQSGAELVRPGASVKMSCKASGYTFTSYNMHWVKQTPRQGLEWIGAIYPGNGDTSYNQKFKGKATLTVDKSSSTAYMQLSSLTSEDSAVYFCARVVYYSNSYWYFDVWGTGTTVTVSSDQEPKSSDKTHTSPPSPAPELLGGPSVFLFPPKPKDTLMISRTPEVTCVVVDVSHEDPEVKFNWYVDGVEVHNAKTKPREEQYNSTYRVVSVLTVLHQDWLNGKEYKCKVSNKALPAPIEKTISKAKGQPREPQVYTLPPSREEMTKNQVSLTCLVKGFYPSDIAVEWESNGQPENNYKTTPPVLDSDGSFALASKLTVDKSRWQQGNVFSCSVMHEALHNHYTQKSLSLSPGK

SEQ ID NO: 390 - DNA, 44 bp, Artificial sequence
  5' oligo to mutate IgG1
gttgttgatcaggagcccaaatcttctgacaaaactcacacatg

SEQ ID NO: 391 - DNA, 54 bp, Artificial sequence
  5' oligo to mutate IgG1
gttgttgatcaggagcccaaatcttgtgacaaaactcacacatctccaccgtgc

SEQ ID NO: 392 - DNA, 63 bp, Artificial sequence
  5' oligo to mutate IgG1
gttgttgatcaggagcccaaatcttgtgacaaaactcacacatgtccaccgtccccagcacct

SEQ ID NO: 393 - DNA, 1521 bp, Artificial sequence
  2H7 scFvIgG1 (SCC)H WTCH2 WTCH3
aagcttgccgccatggattttcaagtgcagattttcagcttcctgctaatcagtgcttcagtcataattgccagaggacaaattgttctctcccagtctccagcaatcctgtctgcatctccaggggagaaggtcacaatgacttgcagggccagctcaagtgtaagttacatgcactggtaccagcagaagccaggatcctcccccaaaccctggatttatgccccatccaacctggcttctggagtccctgctcgcttcagtggcagtgggtctgggacctcttactctctcacaatcagcagagtggaggctgaagatgctgccacttattactgccagcagtggagttttaacccacccacgttcggtgctgggaccaagctggagctgaaagatggcggtggctcgggcggtggtggatctggaggaggtgggagctctcaggcttatctacagcagtctggggctgagctggtgaggcctggggcctcagtgaagatgtcctgcaaggcttctggctacacatttaccagttacaatatgcactgggtaaagcagacacctagacagggcctggaatggattggagctatttatccaggaaatggtgatacttcctacaatcagaagttcaagggcaaggccacactgactgtagacaaatcctccagcacagcctacatgcagctcagcagcctgacatctgaagactctgcggtctatttctgtgcaagagtggtgtactatagtaactcttactggtacttcgatgtctggggcacagggaccacggtcaccgtctcttctgatcaggagcccaaatcttctgacaaaactcacacatgcccaccgtgcccagcacctgaactcctggggggaccgtcagtcttcctcttccccccaaaacccaaggacaccctcatgatctcccggacccctgaggtcacatgcgtggtggtggacgtgagccacgaagaccctgaggtcaagttcaactggtacgtggacggcgtggaggtgcataatgccaagacaaagccgcgggaggagcagtacaacagcacgtaccgtgtggtcagcgtcctcaccgtcctgcaccaggactggctgaatggcaaggagtacaagtgcaaggtctccaacaaagccctcccagcccccatcgagaaaacaatctccaaagccaaagggcagccccgagaaccacaggtgtacaccctgcccccatcccgggatgagctgaccaagaaccaggtcagcctgacctgcctggtcaaaggcttctatcccagcgacatcgccgtggagtgggagagcaatgggcagccggagaacaactacaagaccacgcctcccgtgctggactccgacggctccttcttcctctacagcaagctcaccgtggacaagagcaggtggcagcaggggaacgtcttctcatgctccgtgatgcatgaggctctgcacaaccactacacgcagaagagcctctccctgtctccgggtaaatgatctaga

SEQ ID NO: 394 - DNA, 1521 bp, Artificial sequence
  2H7 scFvIgG1 (CSC)H WTCH2 WTCH3
aagcttgccgccatggattttcaagtgcagattttcagcttcctgctaatcagtgcttcagtcataattgccagaggacaaattgttctctcccagtctccagcaatcctgtctgcatctccaggggagaaggtcacaatgacttgcagggccagctcaagtgtaagttacatgcactggtaccagcagaagccaggatcctcccccaaaccctggatttatgccccatccaacctggcttctggagtccctgctcgcttcagtggcagtgggtctgggacctcttactctctcacaatcagcagagtggaggctgaagatgctgccacttattactgccagcagtggagttttaacccacccacgttcggtgctgggaccaagctggagctgaaagatggcggtggctcgggcggtggtggatctggaggaggtgggagctctcaggcttatctacagcagtctggggctgagctggtgaggcctggggcctcagtgaagatgtcctgcaaggcttctggctacacatttaccagttacaatatgcactgggtaaagcagacacctagacagggcctggaatggattggagctatttatccaggaaatggtgatacttcctacaatcagaagttcaagggcaaggccacactgactgtagacaaatcctccagcacagcctacatgcagctcagcagcctgacatctgaagactctgcggtctatttctgtgcaagagtggtgtactatagtaactcttactggtacttcgatgtctggggcacagggaccacggtcaccgtctcttctgatcaggagcccaaatcttgtgacaaaactcacacatctccaccgtgcccagcacctgaactcctggggggaccgtcagtcttcctcttccccccaaaacccaaggacaccctcatgatctcccggacccctgaggtcacatgcgtggtggtggacgtgagccacgaagaccctgaggtcaagttcaactggtacgtggacggcgtggaggtgcataatgccaagacaaagccgcgggaggagcagtacaacagcacgtaccgtgtggtcagcgtcctcaccgtcctgcaccaggactggctgaatggcaaggagtacaagtgcaaggtctccaacaaagccctcccagcccccatcgagaaaacaatctccaaagccaaagggcagccccgagaaccacaggtgtacaccctgcccccatcccgggatgagctgaccaagaaccaggtcagcctgacctgcctggtcaaaggcttctatcccagcgacatcgccgtggagtgggagagcaatgggcagccggagaacaactacaagaccacgcctcccgtgctggactccgacggctccttcttcctctacagcaagctcaccgtggacaagagcaggtggcagcaggggaacgtcttctcatgctccgtgatgcatgaggctctgcacaaccactacacgcagaagagcctctccctgtctccgggtaaatgatctaga

SEQ ID NO: 395 - DNA, 1521 bp, Artificial sequence
  2H7 scFvIgG1 (CCS) H WTCH2 WTCH3
aagcttgccgccatggattttcaagtgcagattttcagcttcctgctaatcagtgcttcagtcataattgccagaggacaaattgttctctcccagtctccagcaatcctgtctgcatctccaggggagaaggtcacaatgacttgcagggccagctcaagtgtaagttacatgcactggtaccagcagaagccaggatcctcccccaaaccctggatttatgccccatccaacctggcttctggagtccctgctcgcttcagtggcagtgggtctgggacctcttactctctcacaatcagcagagtggaggctgaagatgctgccacttattactgccagcagtggagttttaacccacccacgttcggtgctgggaccaagctggagctgaaagatggcggtggctcgggcggtggtggatctggaggaggtgggagctctcaggcttatctacagcagtctggggctgagctggtgaggcctggggcctcagtgaagatgtcctgcaaggcttctggctacacatttaccagttacaatatgcactgggtaaagcagacacctagacagggcctggaatggattggagctatttatccaggaaatggtgatacttcctacaatcagaagttcaagggcaaggccacactgactgtagacaaatcctccagcacagcctacatgcagctcagcagcctgacatctgaagactctgcggtctatttctgtgcaagagtggtgtactatagtaactcttactggtacttcgatgtctggggcacagggaccacggtcaccgtctcttctgatcaggagcccaaatcttgtgacaaaactcacacatgtccaccgtccccagcacctgaactcctggggggaccgtcagtcttcctcttccccccaaaacccaaggacaccctcatgatctcccggacccctgaggtcacatgcgtggtggtggacgtgagccacgaagaccctgaggtcaagttcaactggtacgtggacggcgtggaggtgcataatgccaagacaaagccgcgggaggagcagtacaacagcacgtaccgtgtggtcagcgtcctcaccgtcctgcaccaggactggctgaatggcaaggagtacaagtgcaaggtctccaacaaagccctcccagcccccatcgagaaaacaatctccaaagccaaagggcagccccgagaaccacaggtgtacaccctgcccccatcccgggatgagctgaccaagaaccaggtcagcctgacctgcctggtcaaaggcttctatcccagcgacatcgccgtggagtgggagagcaatgggcagccggagaacaactacaagaccacgcctcccgtgctggactccgacggctccttcttcctctacagcaagctcaccgtggacaagagcaggtggcagcaggggaacgtcttctcatgctccgtgatgcatgaggctctgcacaaccactacacgcagaagagcctctccctgtctccgggtaaatgatctaga

SEQ ID NO: 396 - protein, 500 aa, Artificial sequence
  2H7 scFvIgG1 (SCC)H WTCH2 WTCH3
MDFQVQIFSFLLISASVIIARGQIVLSQSPAILSASPGEKVTMTCRASSSVSYMHWYQQKPGSSPKPWIYAPSNLASGVPARFSGSGSGTSYSLTISRVEAEDAATYYCQQWSFNPPTFGAGTKLELKDGGGSGGGGSGGGGSSQAYLQQSGAELVRPGASVKMSCKASGYTFTSYNMHWVKQTPRQGLEWIGAIYPGNGDTSYNQKFKGKATLTVDKSSSTAYMQLSSLTSEDSAVYFCARVVYYSNSYWYFDVWGTGTTVTVSSDQEPKSSDKTHTCPPCPAPELLGGPSVFLFPPKPKDTLMISRTPEVTCVVVDVSHEDPEVKFNWYVDGVEVHNAKTKPREEQYNSTYRVVSVLTVLHQDWLNGKEYKCKVSNKALPAPIEKTISKAKGQPREPQVYTLPPSRDELTKNQVSLTCLVKGFYPSDIAVEWESNGQPENNYKTTPPVLDSDGSFFLYSKLTVDKSRWQQGNVFSCSVMHEALHNHYTQKSLSLSPGK

SEQ ID NO: 397 - protein, 500 aa, Artificial sequence
  2H7 scFvIgG1 (CSC)H WTCH2 WTCH3
MDFQVQIFSFLLISASVIIARGQIVLSQSPAILSASPGEKVTMTCRASSSVSYMHWYQQKPGSSPKPWIYAPSNLASGVPARFSGSGSGTSYSLTISRVEAEDAATYYCQQWSFNPPTFGAGTKLELKDGGGSGGGGSGGGGSSQAYLQQSGAELVRPGASVKMSCKASGYTFTSYNMHWVKQTPRQGLEWIGAIYPGNGDTSYNQKFKGKATLTVDKSSSTAYMQLSSLTSEDSAVYFCARVVYYSNSYWYFDVWGTGTTVTVSSDQEPKSCDKTHTSPPCPAPELLGGPSVFLFPPKPKDTLMISRTPEVTCVVVDVSHEDPEVKFNWYVDGVEVHNAKTKPREEQYNSTYRVVSVLTVLHQDWLNGKEYKCKVSNKALPAPIEKTISKAKGQPREPQVYTLPPSRDELTKNQVSLTCLVKGFYPSDIAVEWESNGQPENNYKTTPPVLDSDGSFFLYSKLTVDKSRWQQGNVFSCSVMHEALHNHYTQKSLSLSPGK

SEQ ID NO: 398 - protein, 500 aa, Artificial sequence
  2H7 scFvIgG1 (CCS)H WTCH2 WTCH3
MDFQVQIFSFLLISASVIIARGQIVLSQSPAILSASPGEKVTMTCRASSSVSYMHWYQQKPGSSPKPWIYAPSNLASGVPARFSGSGSGTSYSLTISRVEAEDAATYYCQQWSFNPPTFGAGTKLELKDGGGSGGGGSGGGGSSQAYLQQSGAELVRPGASVKMSCKASGYTFTSYNMHWVKQTPRQGLEWIGAIYPGNGDTSYNQKFKGKATLTVDKSSSTAYMQLSSLTSEDSAVYFCARVVYYSNSYWYFDVWGTGTTVTVSSDQEPKSCDKTHTCPPSPAPELLGGPSVFLFPPKPKDTLMISRTPEVTCVVVDVSHEDPEVKFNWYVDGVEVHNAKTKPREEQYNSTYRVVSVLTVLHQDWLNGKEYKCKVSNKALPAPIEKTISKAKGQPREPQVYTLPPSRDELTKNQVSLTCLVKGFYPSDIAVEWESNGQPENNYKTTPPVLDSDGSFFLYSKLTVDKSRWQQGNVFSCSVMHEALHNHYTQKSLSLSPGK

SEQ ID NO: 399 - DNA, 793 bp, Artificial sequence
  500A2 anti-mouse CD3 scFv
atgttgtatacatctcagctccttgggcttttactcttctggatttcagcctccagaagtgacatagtgctgactcagactccagccactctgtctctaattcctggagaaagagtcacaatgacctgtaagaccagtcagaatattggcacaatcttacactggtatcaccaaaaaccaaaggaggctccaagggctctcatcaagtatgcttcgcagtccattcctgggatcccctccagattcagtggcagtggttcggaaacagatttcactctcagcatcaataacctggagcctgatgatatcggaatttattactgtcaacaaagtagaagctggcctgtcacgttcggtcctggcaccaagctggagataaaacggggtggcggtggctcgggcggaggtgggtcgggtggcggcggatctcaggtcaagctgcagcagtccggttctgaactagggaaacctggggcctcagtgaaactgtcctgcaagacttcaggctacatattcacagatcactatatttcttgggtgaaacagaagcctggagaaagcctgcagtggataggaaatgtttatggtggaaatggtggtacaagctacaatcaaaaattccagggcaaggccacactgactgtagataaaatctctagcacagcctacatggaactcagcagcctgacatctgaggattctgccatctattactgtgcaagaaggccggtagcgacgggccatgctatggactactggggtcaggggatccaagttaccgtctcctctgatc

SEQ ID NO: 400 - protein, 264 aa, Artificial sequence
  500A2 anti-mouse CD3 scFv
MLYTSQLLGLLLFWISASRSDIVLTQTPATLSLIPGERVTMTCKTSQNIGTILHWYHQKPKEAPRALIKYASQSIPGIPSRFSGSGSETDFTLSINNLEPDDIGIYYCQQSRSWPVTFGPGTKLEIKRGGGGSGGGGSGGGGSQVKLQQSGSELGKPGASVKLSCKTSGYIFTDHYISWVKQKPGESLQWIGNVYGGNGGTSYNQKFQGKATLTVDKISSTAYMELSSLTSEDSAIYYCARRPVATGHAMDYWGQGIQVTVSSD

SEQ ID NO: 401 - DNA, 36 bp, Artificial sequence
  Oligonucleotide primer
gttgttgatcagccagttccctcaactccacctacc

SEQ ID NO: 402 - DNA, 44 bp, Artificial sequence
  Oligonucleotide primer
gttgttttcgaaggatccgcgtccacctccgccatgacaacaga

SEQ ID NO: 403 - DNA, 47 bp, Artificial sequence
  Oligonucleotide primer
gttgttttcgaaggatccgctttacccggagacagggagaggctctt

SEQ ID NO: 404 - DNA, 45 bp, Artificial sequence
  Oligonucleotide primer
gttgttagatctggagcccaaatcttgtgacaaaactcacacatg

SEQ ID NO: 405 - DNA, 48 bp, Artificial sequence
  Oligonucleotide primer
gttgtggatccttcgaacccgttcctggtgctgctgcactcggtgtcg

SEQ ID NO: 406 - DNA, 48 bp, Artificial sequence
  Oligonucleotide
gttgttatcgatctcgagttatcaggacgcttcggaggtagatgcgtc

SEQ ID NO: 407 - DNA, 657 bp, Artificial sequence
  Fusion polynucleotide
gtggatccttcgaacccgttcctggtgctgctgcactcggtgtcgtccagcctgtcgagcagcgagctgaccgagctcaagttcctatgcctcgggcgcgtgggcaagcgcaagctggagcgcgtgcagagcggcctagacctcttctccatgctgctggagcagaacgacctggagcccgggcacaccgagctcctgcgcgagctgctcgcctccctgcggcgccacgacctgctgcggcgcgtcgacgacttcgaggcgggggcggcggccggggccgcgcctggggaagaagacctgtgtgcagcatttaacgtcatatgtgataatgtggggaaagattggagaaggctggctcgtcagctcaaagtctcagacaccaagatcgacagcatcgaggacagatacccccgcaacctgacagagcgtgtgcgggagtcactgagaatctggaagaacacagagaaggagaacgcaacagtggcccacctggtgggggctctcaggtcctgccagatgaacctggtggctgacctggtacaagaggttcagcaggcccgtgacctccagaacaggagtggggccatgtccccgatgtcatggaactcagacgcatctacctccgaagcgtcctgataactcgagatcgataacaac

SEQ ID NO: 408 - protein, 211 aa, Artificial sequence
  Fusion polypeptide
VDPSNPFLVLLHSVSSSLSSSELTELKFLCLGRVGKRKLERVQSGLDLFSMLLEQNDLEPGHTELLRELLASLRRHDLLRRVDDFEAGAAAGAAPGEEDLCAAFNVICDNVGKDWRRLARQLKVSDTKIDSIEDRYPRNLTERVRESLRIWKNTEKENATVAHLVGALRSCQMNLVADLVQEVQQARDLQNRSGAMSPMSWNSDASTSEAS

SEQ ID NO: 409 - DNA, 60 bp, Artificial sequence
  Oligonucleotide
gttgtggatcctcccttttgggtgctggtggtggttggtgtcctggcttgctatagcttg

SEQ ID NO: 410 - DNA, 60 bp, Artificial sequence
  Oligonucleotide
gttgtttcgaacccagaaaataataaaggccactgttactagcaagctatagcaagccag

SEQ ID NO: 411 - DNA, 32 bp, Artificial sequence
  Oligonucleotide
gttgtggatcctcccttttgggtgctggtggt

SEQ ID NO: 412 - DNA, 33 bp, Artificial sequence
  Oligonucleotide
gttgtttcgaacccagaaaataataaaggccac

SEQ ID NO: 413 - DNA, 28 bp, Artificial sequence
  OIigonucleotide
gttgtggatcctcctgctcccatcctgg

SEQ ID NO: 414 - DNA, 32 bp, Artificial sequence
  Oligonucleotide
gttgtttcgaacggcaaagcagtaggtcaggc

SEQ ID NO: 415 - DNA, 45 bp, Artificial sequence
  Oligonucleotide
gttgtggatccttcgaacccattcctggtgctgctgcactcgctg

SEQ ID NO: 416 - DNA, 42 bp, Artificial sequence
  Oligonucleotide
gttgttatcgatctcgagtcagggtgtttctgaggaagacac

SEQ ID NO: 417 - DNA, 645 bp, Artificial sequence
  Fusion polynucleotide
gtggatccttcgaacatggacccattcctggtgctgctgcactcgctgtccggcagcctgtcgggcaacgatctgatggagctcaagttcttgtgccgcgagcgcgtgagcaaacgaaagctggagcgcgtgcagagtggcctggacctgttcacggtgctgctggagcagaacgacctggagcgcgggcacaccgggctgctgcgcgagttgctggcctcgctgcgccgacacgatctactgcagcgcctggacgacttcgaggcggggacggcgaccgctgcgcccccgggggaggcagatctgcaggtggcatttgacattgtgtgtgacaatgtggggagagactggaaaagactggcccgcgagctgaaggtgtctgaggccaagatggatgggattgaggagaagtacccccgaagtctgagtgagcgggtaagggagagtctgaaagtctggaagaatgctgagaagaagaacgcctcggtggccggactggtcaaggcgctgcggacctgcaggctgaatctggtggctgacctggtggaagaagcccaggaatctgtgagcaagagtgagaatatgtccccagtactaagggattcaactgtgtcttcctcagaaacaccctgactcgagatcgat

SEQ ID NO: 418 - protein, 210 aa, Artificial sequence
  Fusion polypeptide
VDPSNMDPFLVLLHSLSGSLSGNDLMELKFLCRERVSKRKLERVQSGLDLFTVLLEQNDLERGHTGLLRELLASLRRHDLLQRLDDFEAGTATAAPPGEADLQVAFDIVCDNVGRDWKRLARELKVSEAKMDGIEEKYPRSLSERVRESLKVWKNAEKKNASVAGLVKALRTCRLNLVADLVEEAQESVSKSENMSPVLRDSTVSSSETP

SEQ ID NO: 419 - DNA, 48 bp, Artificial sequence
  Oligonucleotide
gttgtggatccttcgaacatggagaacaacaaaacctcagtggattca

SEQ ID NO: 420 - DNA, 44 bp, Artificial sequence
  Oligonucleotide
gttgttatcgatctcgagctagtgataaaagtacagttctttcg

SEQ ID NO: 421 - DNA, 46 bp, Artificial sequence
  Oligonucleotide
gttgtttcgaacatggatttccagagttgtctttatgctattgctg

SEQ ID NO: 422 - DNA, 48 bp, Artificial sequence
  Oligonucleotide
gttgttatcgatctcgagtcattagggagggaagaagagcttcttccg

SEQ ID NO: 423 - DNA, 45 bp, Artificial sequence
  OIigonucleotide
gttgtggatccttcgaacatggagaacactgaaaactcagtggat

SEQ ID NO: 424 - DNA, 48 bp, Artificial sequence
  Oligonucleotide
gttgttatcgatctcgagttagtgataaaaatagagttcttttgtgag

SEQ ID NO: 425 - DNA, 45 bp, Artificial sequence
  Oligonucleotide
gttgtggatccttcgaacatggacttcagcagaaatctttatgat

SEQ ID NO: 426 - DNA, 48 bp, Artificial sequence
  Oligonucleotide
gttgttatcgatgcatgctcaatcagaagggaagacaagtttttttct

SEQ ID NO: 427 - DNA, 714 bp, Artificial sequence; identical to SEQ ID NO: 207
  Human IgG1 WT Fc (hinge, CH2, CH3)

SEQ ID NO: 428 - protein, 234 aa, Artificial sequence
  HuIgG1 WT hinge, CH2, CH3
SDQEPKSCDKTHTCPPCPAPELLGGPSVFLFPPKPKDTLMISRTPEVTCVVVDVSHEDPEVKTHWYVDGVEVHNAKTKPREEQYNSTYRVVSVLTVLHQDWLNGKEYKCKVSNKALPAPIEKTISKAKGQPREPQVYTLPPSRDELTKNQVSLTCLVKGFYPSDIAVEWESNGQPENNYKTTPPVLDSDGSFFLYSKLTVDKSRWQQGNVFSCSVMHEALHNHYTQKSLSLSPG

SEQ ID NO: 429 - DNA, 718 bp, Llama; identical to SEQ ID NO: 209
  misc_feature (34)..(34): n is a, c, g, or t
  misc_feature (43)..(43): n is a, c, g, or t
  misc_feature (52)..(52): n is a, c, g, or t
  misc_feature (55)..(55): n is a, c, g, or t
  misc_feature (58)..(58): n is a, c, g, or t
  misc_feature (64)..(64): n is a, c, g, or t

SEQ ID NO: 430 - protein, 230 aa, Llama
EPHGGCTCPQCPAPELPGGPSVFVTBPKPKDVLSISGRPEVTCVVVDVGKEDPEVNFHWYIDGVEVRTANTKPKEEQFNSTYRVVSVLPIQHQDWLTGKETKCKVNNKALPAPIERTISKAKGQTREPQVYTLAPHREELAKDTVSVTCLVKGFYPADINVEWQMGQPESEGTYANTPPQLDNDGTYFLYSRLSVGKNTWQRGCTLTGVVMHEALHNHYTQKSITQSSGK

SEQ ID NO: 431 - DNA, 757 bp, Llama; identical to SEQ ID NO: 210

SEQ ID NO: 432 - protein, 247 aa, Llama
DQEPKTPKPQPQPQPQPNPTTESKCPKCPAPELLGGPSVFIFPPKPKDVLSISGRPEVTCVVVDVGQEDPEVSFHWYIDGAEVRTANTRPKEEQFNSTYRVVSVLPIQHQDWLTGKEFKCKVNNKALPAPIEKTISKAKGQTREPQVYTLAPHREELAKDTVSVTCLVKGFYPPDINVEWQMGQPESEGTYATTPPQLDNDGTYFLYSKLSVGKNTWQQGCTFTCVVMHEALHNHYTQKSITQSSGK

SEQ ID NO: 433 - DNA, 727 bp, Llama; identical to SEQ ID NO: 211

SEQ ID NO: 434 - protein, 236 aa, Llama
DQAHHSEDPSSKEPKCPGPELLGGPTVFIFPPKAKDVLSITRKPEVTCLWWTWVKKTLRSSSSWSVDDTEVHTAETKPKEEQFHSTYRVVSVLPIQHQDWLTGKEFKEKVNNKALPAPIERTISKAKGQTREPQVYTLAPHREELAKDTVSVTELVKGFFPADINVEWQRNGQPESEGTYANTPPQLDNDGTYFLYSKLSVGKNTWQQGEVFTCVVMHEALHNHSTQKSITQSSGK

SEQ ID NO: 435 - DNA, 54 bp, Artificial sequence; identical to SEQ ID NO: 215
  HuIgG1 wild type hinge

SEQ ID NO: 436 - protein, 18 aa, Artificial sequence
  HuIgG1 wild type hinge
DQEPKSCDKTHTCPPEPA

SEQ ID NO: 437 - DNA, 54 bp, Artificial sequence
  HuIgG1 H2
gatctggagcccaaatcttgtgacaaaactcacccatgcccaccgtgcccagca

SEQ ID NO: 438 - protein, 18 aa, Artificial sequence
  HuIgG1 H2
DLEPKSEDKTHTCPPCPA

SEQ ID NO: 439 - DNA, 327 bp, Artificial sequence; identical to SEQ ID NO: 219
  HuIgG1 wild type CH2

SEQ ID NO: 440 - protein, 109 aa, Artificial sequence
  HuIgG1 wild type CH2
PELLGGPSVFLFPPKPKDTLMISRTPEVTCVVVDVSHEDPEVKTHWYVDGVEVHNAKTKPREEQYNSTYRVVSVLTVLHQDWLNGKEYKCKVSNKALPAPIEKTISKAK

SEQ ID NO: 441 - DNA, 324 bp, Artificial sequence
  HuIgG1 wild type CH3
gggcagccccgagaaccacaggtgtacaccctgcccccatcccgggaggagatgaccaagaaccaggtcagcctgacctgcctggtcaaaggcttctatcccagcgacatcgccgtggagtgggagagcaatgggcagccggagaacaactacaagaccacgcctcccgtgctggactccgaaggctccttattcctctatagcaagctcaccgtggacaagagcaggtggcagcaggggaacgtcttctcatgctccgtgatgcatgaggctctgcacaaccactacacgcagaagagcctctccctgtccccgggtaaatga

SEQ ID NO: 442 - protein, 107 aa, Artificial sequence; identical to SEQ ID NO: 222
  HuIgG1 wild type CH3

SEQ ID NO: 443 - DNA, 54 bp, Artificial sequence; identical to SEQ ID NO: 223
  HuIgG1 mutated hinge (SSS)

SEQ ID NO: 444 - protein, 18 aa, Artificial sequence
  HuIgG1 mutated hinge (SSS)
DQEPKSSDKTHTSPPSPA

SEQ ID NO: 445 - DNA, 711 bp, Artificial sequence
  HuIgG1MTH WTCH2CH3
tgatcaccccaaatcttctgacaaaactcacacatctccaccgtcctcagcacctgaactcctgggtggaccgtcagtcttcctcttccccccaaaacccaaggacaccctcatgatctcccggacccctgaggtcacatgcgtggtggtggacgtgagccacgaagaccctgaggtcaagttcaactggtacgtggacggagtggaggtgcataatgccaagacaaagccgcgggaggagcagtacaacagcacgtaccgtgtggtcagcgtcctcaccgtcctgcaccaggactggctgaatggcaaggagtacaagtgcaaggtctccaacaaagccctcccagcccccatcgagaaaacaatctccaaagccaaagggcagccccgagaaccacaggtgtacaccctgcccccatcccgggatgagctgaccaagaaccaggtcagcctgacctgcctggtcaaaggcttctatcccagcgacatcgccgtggagtgggagagcaatgggcagccggagaacaactacaagaccacgcctcccgtgctggactccgacggctcctcttcctctacagcaagctcaccgtggacaagagcaggtggcagcaggggaacgtcttctcatgctccgtgatgcatgaggctctgcacaaccactacacgcagaagagcctctccctgtctccgggtaaatgataatctaga

SEQ ID NO: 446 - protein, 235 aa, Artificial sequence
  HuIgG1MTH WTCH2CH3
DHPKSSDKTHTSPPSSAPELLGGPSVFLFPPKPKDTLMISRTPEVTCVVVDVSHEDPEVKTHWYVDGVEVHNAKTKPREEQYNSTYRVVSVLTVLHQDWLNGKEYKEKVSNKALPAPIEKTISKAKGQPREPQVYTLPPSRDELTKNQVSLTCLVKGFYPSDIAVEWESNGQPENNYKTTPPVLDSDGSFFLYSKLTVDKSRWQQGFLVFSESVMHEALHFLHYTQKSLSLSPGK

SEQ ID NO: 447 - DNA, 35 bp, Artificial sequence; identical to SEQ ID NO: 227
  primer

SEQ ID NO: 448 - DNA, 32 bp, Artificial sequence; identical to SEQ ID NO: 228
  primer

SEQ ID NO: 449 - DNA, 33 bp, Artificial sequence; identical to SEQ ID NO: 229
  primer

SEQ ID NO: 450 - DNA, 19 bp, Artificial sequence
  primer
ctgagatcgagttcagctg

SEQ ID NO: 451 - DNA, 19 bp, Artificial sequence
  primer
cctcctttggctttgtctc

SEQ ID NO: 452 - DNA, 1527 bp, Llama
  misc_feature (852)..(852): n is a, c, g, or t
  misc_feature (861)..(861): n is a, c, g, or t
  misc_feature (864)..(864): n is a, c, g, or t
  misc_feature (867)..(867): n is a, c, g, or t
aagcttgccgccatggattttcaagtgcagattttcagcttcctgctaatcagtgcttcagtcataattgccagaggacaaattgttctctcccagtctccagcaatcctgtctgcatctccaggggagaaggtcacaatgacttgcagggccagctcaagtgtaagttacatgcactggtaccagcagaagccaggatcctcccccaaaccctggatttatgccccatccaacctggcttctggagtccctgctcgcttcagtggcagtgggtctgggacctcttactctctcacaatcagcagagtggaggctgaagatgctgccacttattactgccagcagtggagttttaacccacccacgttcggtgctgggaccaagctggagctgaaagatggcggtggctcgggcggtggtggatctggaggaggtgggagctctcaggcttatctacagcagtctggggctgagctggtgaggcctggggcctcagtgaagatgtcctgcaaggcttctggctacacatttaccagttacaatatgcactgggtaaagcagacacctagacagggcctggaatggattggagctatttatccaggaaatggtgatacttcctacaatcagaagttcaagggcaaggccacactgactgtagacaaatcctccagcacagcctacatgcagctcagcagcctgacatctgaagactctgcggtctatttctgtgcaagagtggtgtactatagtaactcttactggtacttcgatgtctggggcacagggaccacggtcaccgtctcttctgatcaagaaccacatggaggatgcacgtgcctccagtgcccncaatgcccngcnccngaactcccaggaggcccttctgtctttgtcttccccccgaaacccaaggacgtcctctccatttttggaggccgagtcacgtgcgttgtagtggacgtcggaaagaaagaccccgaggtcaatttcaactggtatattgatggcgttgaggtgcgaacggccaatacgaagccaaaagaggaacagttcaacagcacgtaccgcgtggtcagcgtcctgcccatccagcaccaggactggctgacggggaaggaattcaagtgcaaggtcaacaacaaagctctcccggcccccatcgagaggaccatctccaaggccaaagggcagacccgggagccgcaggtgtacaccctggccccacaccgggaagaactggccaaggacaccgtgagcgtaacatgcctggtcaaaggcttctacccagctgacatcaacgttgagtggcagaggaacggtcagccggagtcagagggcacctacgccaacacgccgccacagctggacaacgacgggacctacttcctctacagcaagctctcggtgggaaagaacacgtggcagcggggagaaaccttaacctgtgtggtgatgcatgaggccctgcacaaccactacacccagaaatccatcacccagtcttcgggtaaatagtaatctaga

SEQ ID NO: 453 - protein, 504 aa, Llama
MDFQVQIFSFLLISASVLLARGQIVLSQSPAILSASPGEKVTMTCRASSSVSYMHWYQQKPGSSPKPWIYAPSNLASGVPARFSGSGSGTSYSLTISRVEAEDAATYYCQQWSFHPPTFGAGTKLELKDGGGSGGGGSGGGGSSQAYLQQSGAELVRPGASVKMSCKASGYTFTSYNMHWVKQTPRQGLEWIGAIYPGNGDTSYNQKFKGKATLTVDKSSSTAYMQLSSLTSEDSAVYFCARVVYYSNSYWYFDVWGTGTTVTVSSDQEPHGGCTCPQCPAPELPGGPSVLVFPPKPKDVLSIFGGLWTCVVVDVGKKDPEVNFNWYIDGVEVRTANTKPKEEQTHSTYRVVSVLPIQHQDWLTGKETKCKVNFLKALPAPIERTISKAKGQTREPQVYTLAPHREELAKDTVSVTCLVKGFYPADINVEWQRFLGQPESEGTYAFLTPPQLDFLDGTYFLYSKLASVGKFLTWQRGCTLTCVVMHEALHNHYTQKSITQSSGK

SEQ ID NO: 454 - DNA, 1567 bp, Llama
aagcttgccgccatggattttcaagtgcagattttcagcttcctgctaatcagtgcttcagtcataattgccagaggacaaattgttctctcccagtctccagcaatcctgtctgcatctccaggggagaaggtcacaatgacttgcagggccagctcaagtgtaagttacatgcactggtaccagcagaagccaggatcctcccccaaaccctggatttatgccccatccaacctggcttctggagtccctgctcgcttcagtggcagtgggtctgggacctcttactctctcacaatcagcagagtggaggctgaagatgctgccacttattactgccagcagtggagttttaacccacccacgttcggtgctgggaccaagctggagctgaaagatggcggtggctcgggcggtggtggatctggaggaggtgggagctctcaggcttatctacagcagtctggggctgagctggtgaggcctggggcctcagtgaagatgtcctgcaaggcttctggctacacatttaccagttacaatatgcactgggtaaagcagacacctagacagggcctggaatggattggagctatttatccaggaaatggtgatacttcctacaatcagaagttcaagggcaaggccacactgactgtagacaaatcctccagcacagcctacatgcagctcagcagcctgacatctgaagactctgcggtctatttctgtgcaagagtggtgtactatagtaactcttactggtacttcgatgtctggggcacagggaccacggtcaccgtctcttctgatcaagaacccaagacaccaaaaccacaaccacaaccacaaccacaacccaatcctacaacagaatccaagtgtcccaaatgtccagcccctgagctcctgggagggccctcagtcttcatcttccccccgaaacccaaggacgtcctctccatttcctgggaggcccgaggtcacgtgcgttgtggtagacgtgggccaggaagaccccgaggtcagtttcaactggtacattgatggcgctgaggtgcgaacggccaacacgaggccaaaagaggaacagttcaacagcacgtaccgcgtggtcagcgtcctgcccatccagcaccaggactggctgacggggaaggaattcaagtgcaaggtcaacaacaaagctctcccggcccccatcgagaagaccatctccaaggccaaagggcagacccgggagccgcaggtgtacaccctggccccacaccgggaagagctggccaaggacaccgtgagcgtaacatgcctggtcaaaggcttctacccacctgatatcaacgttgagtggcagaggaatgggcagccggagtcagagggcacytacgccaccacgccaccccagctggacaacgacgggacctacttcctctacagcaagctctcggtgggaaagaacacgtggcagcagggagaaaccttcacctgtgtggtgatgcacgaggccctgcacaaccactacacccagaaatccatcacccagtcttcgggtaaatagtaatctaga

SEQ ID NO: 455 - protein, 514 aa, Llama
MDFQVQIFSFLLISASVIIARGQIVLSQSPAILSASPGEKVTMTCRASSSVSYMHWYQQKPGSSPKPWIYAPSNLASGVPARFSGSGSGTSYSLTISRVEAEDAATYYCQQWSFNPPTFGAGTKLELKDGGGSGGGGSGGGGSSQAYLQQSGAELVRPGASVKMSCKASGYTFTSYNMHWVKQTPRQGLEWIGAIYPGNGDTSYNQKTKGKATLTVDKSSSTAYMQLSSLTSEDSAVYFCARVVYYSNSYWYFDVWGTGTTVTVSSDQEPKTPKPQPQPQPQPNPTTESKCPKCPAPELLGGPSVFIFPPKPKDVLSISGRPEVTCVVVDVGQEDPEVSFNWYIDGAEVRTANTRPKEEQFFISTYRVVSVLPIQHQDWLTGKEFKCKVNNKALPAPIEKTISKAKGQTREPQVYTLAPHREELAKDTVSVTCLVKGFYPPDINVEWQMGQPESEGTYATTPPQLDNDGTYFLYSKLSVGKNTWQQGCTFTCVVMHEALHNHYTQKSITQSSGK

SEQ ID NO: 456 - DNA, 1536 bp, Llama; identical to SEQ ID NO: 234

SEQ ID NO: 457 - protein, 503 aa, Llama
MDFQVQIFSFLLISASVIIARGQIVLSQSPAILSASPGEKVTMTCRASSSVSYMHWYQQKPGSSPKPWIYAPSNLASGVPARFSGSGSGTSYSLTISRVEAEDAATYYCQQWSFNPPTFGAGTKLELKDGGGSGGGGSGGGGSSQAYLQQSGAELVRPGASVKMSCKASGYTFTSYNMHWVKQTPRQGLEWIGAIYPGNGDTSYNQKFKGKATLTVDKSSSTAYMQLSSLTSEDSAVYFCARVVYYSNSYWYFDVWGTGTTVTVSSDQAHSHSEDPSSKCPKCPGPELLGGPTVFIFPPKAKDVLSITRKPEVTCLWWTWVKKTLRSSSSWSVDDTEVHTAETKPKEEQTHSTYRVVSVLPIQHQDWLTGKEFKCKVNNKALPAPIERTISKAKGQTREPQVYTLAPHREELAKDTVSVTCLVKGFFPADINVEWQRNGQPESEGTYANTPPQLDNDGTYFLYSKLSVGKNTWQQGEVFTCVVMHEALHNHSTQKSITQSSGK

SEQ ID NO: 458 - DNA, 1521 bp, Artificial sequence; identical to SEQ ID NO: 239
  2H7 scFv WTH WTCH2CH3

SEQ ID NO: 459 - protein, 502 aa, Artificial sequence
  2H7 scfV WTH WTCH2CH3
MDFQVQIFSFLLISASVIIARGQIVLSQSPAILSASPGEKVTMTCRASSSVSYMHWYQQKPGSSPKPWIYAPSNLASGVPARFSGSGSGTSYSLTISRVEAEDAATYYCQQWSFRIPPTFGAGTKLELKDGGGSGGGGSGGGGSSQAYLQQSGAELVRPGASVKMSCKASGYTFTSYNMHWVKQTPRQGLEWIGAIYPGNGDTSYNQKTKGKATLTVDKSSSTAYMQLSSLTSEDSAVYFCARVVYYSNSYWYFDVWGTGTTVTVSSDQEPKSCDKTHTCPPCPAPELLGGPSVFLFPPKPKDTLMISRTPEVTCVVVDVSHEDPEVKFNWYVDGVEVHNAKTKPREEQYNSTYRVVSVLTVLHQDWLNGKEYKCKVSNKALPAPIEKTISKAKGQPREPQVYTLPPSRDELTKNQVSLTCLVKGFYPSDIAVEWESNGQPENNYKTTPPVLDSDGSFFLYSKLTVDKSRWQQGNVFSCSVMHEALHINHYTQKSLSLSPGK

SEQ ID NO: 460 - DNA, 162 bp, Artificial sequence; identical to SEQ ID NO: 241
  CD80 Transmembrane domain and cytoplasmic tail

SEQ ID NO: 461 - protein, 51 aa, Artificial sequence; identical to SEQ ID NO: 242
  CD80 Transmembrane domain and cytoplasmic tail

SEQ ID NO: 462 - DNA, 399 bp, Artificial sequence; identical to SEQ ID NO: 243
  40.2.220 VL

SEQ ID NO: 463 - protein, 131 aa, Artificial sequence; identical to SEQ ID NO: 244
  30.2.220.VL

SEQ ID NO: 464 - DNA, 368 bp, Artificial sequence; identical to SEQ ID NO: 245
  40.2.220 VH

SEQ ID NO: 465 - protein, 121 aa, Artificial sequence
  40.2.220 VH
QIQLVQSGPELKKPGCTVRISCKASGYAFTTTGMQWVQEMPGKGLKWIGWINTPLWSAKICRRLQGRFAFSLETSANTAYLQISNLKDEDTATYFCVRSGNGNYDLAYFAYWGQGTLVTVS

SEQ ID NO: 466 - DNA, 812 bp, Artificial sequence; identical to SEQ ID NO: 247
  40.2.220 scFv

SEQ ID NO: 467 - protein, 264 aa, Artificial sequence
  40.2.220 scFv
MDFQVQIFSFLLISASVIMSRGVDIVLTQSPATLSVTPGDRVSLSCRASQSISDYLHWYQQKSHESPRLLIKYASHSISGIPSRFSGSGSGSDFTLSINSVEPEDVGIYYCQHGHSFPFGGGTKLEIKRGGGGSGGGGSGGGGSQIQVQSGPELKKPGCTVRISCKASGYAFTTTGMQWVQEMPGKGLKWIGWINTPLWSAKICRRLQGRFAFSLETSANTAYLQISNLKDEDTATYFCVRSGNGNYDLAYFAYWGQGTLVTVS

SEQ ID NO: 468 - DNA, 405 bp, Artificial sequence; identical to SEQ ID NO: 249
  2e12 VL (with L6 VK leader peptide)

SEQ ID NO: 469 - protein, 135 aa, Artificial sequence; identical to SEQ ID NO: 250
  2e12 VL (with L6 VK leader peptide)

SEQ ID NO: 470 - DNA, 369 bp, Artificial sequence; identical to SEQ ID NO: 251
  2e12 VH

SEQ ID NO: 471 - protein, 121 aa, Artificial sequence
  2e12 VH
QVQLKESGPGLVAPSQSLSITCTVSGFSLTGYGVNWVRQPPGKGLEWLGMIWGDGSTDYNSALKSRLSITKDNSKSQVFLKMNSLQTDDTARYYCARDGYSNTHYYVMDYWGQGTSVTVSS

SEQ ID NO: 472 - DNA, 825 bp, Artificial sequence; identical to SEQ ID NO: 253
  2e12 scFv

SEQ ID NO: 473 - protein, 274 aa, Artificial sequence
  2e12 scFv
MDFQVQIFSFLLISASVIMSRGVDIVLTQSPASLAVSLGQRATISCRASESVEYYVTSLMQWYQQKPGQPPKLLISAASNVESGVPARFSGSGSGTDFSLNIHPVEEDDIAMYFCQQSRKVPWTFGGGTKLEIKRGGGGSGGGGSGGGGSQVQLKESGPGLVAPSQSLSITCTVSGFSLTGYGVNWVRQPPGKGLEWLGMIWGDGSTDYFLSALKSRLSITKDFLSKSQVFLKMFLSLQTDDTARYYCARDGYSNFHYYVMDYWGQGTSVTVSS

SEQ ID NO: 474 - DNA, 393 bp, Artificial sequence; identical to SEQ ID NO: 255
  10A8 VL (with L6 VK leader peptide)

SEQ ID NO: 475 - protein, 131 aa, Artificial sequence; identical to SEQ ID NO: 256
  10A8 VL

SEQ ID NO: 476 - DNA, 362 bp, Artificial sequence; identical to SEQ ID NO: 257
  10A8 VH

SEQ ID NO: 477 - protein, 119 aa, Artificial sequence; identical to SEQ ID NO: 258
  10A8 VH

SEQ ID NO: 478 - DNA, 806 bp, Artificial sequence; identical to SEQ ID NO: 259
  10A8 scFv

SEQ ID NO: 479 - protein, 264 aa, Artificial sequence
  10A8 scFv
MDFQVQIFSFLLISASVIMSRGVDIQMTQSPSSLSASLGGKVTITCKASQDIKKYIGWYQHKPGKGPRLLIYYTSFLQPGIPSRFSGSGSGRDYSLSIMLEPEDIATYYCQQYDNLPLTFGSGTKLEIKRGGGGSGGGGSGGGGSDVQLQESGPGLVKPSQSLSLTCSVTGYSITSGFWNWIRQFPGNKLEWMGHISHDGRNNYNPSLINRISITRDTSKNQFFLKLSSVTTEDTATYFCARHYGSSGAMDYWGQGTSVTVSSD

SEQ ID NO: 480 - DNA, 1671 bp, Artificial sequence; identical to SEQ ID NO: 265
  40.2.220-hmtlgG1-hCD80

SEQ ID NO: 481 - protein, 556 aa, Artificial sequence
  40.2.220-hmtlgG1-hCD80
MDFQVQIFSFLLISASVIMSRGVDIVLTQSPATLSVTPGDRVSLSCRASQSISDYLHWYQQKSHESPRLLIKYASHSISGIPSRFSGSGSGSDFTLSINSVEPEDVGIYYCQHGHSFPWTFGGGTKLEIKRGGGGSGGGGSGGGGSQIQLVQSGPELKKPGETVRISCKASGYAFTTTGMQWVQEMPGKGLKWIGWINTPLWSAKICRRLQGRFAFSLETSAFLTAYLQISFLLKDEDTATYFCVRSGNGNYDLAYFAYWGQGTLVTVSDLEPKSSDKTHTSPPSPAPELLGGSSVFLFPPKPKDTLMISRTPEVTCVVVDVSHEDPEVKFHWYVDGVEVHNAKTKPREEQYNSTYRVVSVLTVLHQDWLFLGKEYKCKVSFLKALPAPIEKTISKAKGQPREPQVYTLPPSRDELTKNQVSLTCLVKGFYPSDIAVEWESNGQPENNYKTTPPVLDSDGSFFLYSKLTVDKSRWQQGNVFSCSVMHEALHNHYTQKSLSLSPGKADPSNLLPSWAITLISVNGIFVICCLTYCFAPRCRERRRNERLRRESVRPV

SEQ ID NO: 482 - DNA, 1683 bp, Artificial sequence; identical to SEQ ID NO: 267
  2e12scFv- hmtlgG1-CD80

SEQ ID NO: 483 - protein, 556 aa, Artificial sequence
  2e12scFv- hmtlgG1-CD80
MDFQVQIFSFFLISASVIMSRGVDIVLTQSPASLAVSLGQRATISCRASESVEYYVTSLMQWYQQKPGQPPKLLISAASNVESGVPARFSGSGSGTDFSLNIHPVEEDDIAMYFCQQSRKVPWTFGGGTKLEIKRGGGGSGGGGSGGGGSQVQLKESGPGLVAPSQSLSITCTVSGFSLTGYGVNWVRQPPGKGLEWLGMIWGDGSTDYNSALKSRLSITKDNSKSQVFLKMFLSLQTDDTARYYCARDGYSNFHYYVMDYWGQGTSVTVSSDLEPKSSDKTHTSPPSPAPELLGGSSVFLFPPKPKDTLMISRTPEVTCVVVDVSHEDPEVKFWYVDGVEVHNAKTKPREEQYNSTYRVVSVLTVLHQDWLNGKEYKCKVSNKALPAPIEKTISKAKGQPREPQVYTLPPSRDELTKNQVSLTCLVKGFYPSDIAVEWESNGQPENNYKTTPPVLDSDGSFFLYSKLTVDKSRWQQGNVFSCSVMHEALHNHYTQKSLSLSPGKADPSNLLPSWAITLISVNGIFVICCLTYCFAPRCRERRRNERLRRESVRPV

SEQ ID NO: 484 - DNA, 1665 bp, Artificial sequence; identical to SEQ ID NO: 269
  10A8 scFv-hmtIgG1-CD80

SEQ ID NO: 485 - protein, 553 aa, Artificial sequence
  10A8 scFv-hmtIgG1-CD80
MDFQVQIFSFLLISASVIMSRGVDIQMTQSPSSLSASLGGKVTITCKASQDIKKYIGWYQHKPGKGPRLLIYYTSTLQPGIPSRFSGSGSGRDYSLSIRNLEPEDIATYYCQQYDNLPLTFGSGTKLEIKRGGGGSGGGGSGGGGSDVQLQESGPGLVKPSQSLSLTCSVTGYSITSGFYWNWIRQFPGNKLEWMGHISHDGRNNYNPSLINRISITRDTSKFLQFFLKLSSVTTEDTATYFCARHYGSSGAMDYWGQGTSVTVSSDLEPKSSDKTHTSPPSPAPELLGGSSVFLFPPKPKDTLMISRTPEVTCVVVDVSHEDPEVKFNWYVDGVEVHNAKTKPREEQYNSTYRVVSVLTVLHQDWLNGKEYKCKVSNKALPAPIEKTISKAKGQPREPQVYTLPPSRDELTKNQVSLTCLVKGFYPSDIAVEWESNGQPENNYKTTPPVLDSDGSFFLYSKLTVDKSRWQQGFLVFSCSVMHEALHFLHYTQKSLSLSPGKADPSNLLPSWAITLISVNGIFVICCLTYCFAPRCRERRRNERLRRESVRPV

SEQ ID NO: 486 - DNA, 1653 bp, Artificial sequence; identical to SEQ ID NO: 271
  500A2-hmtIgG1-CD80

SEQ ID NO: 487 - protein, 548 aa, Artificial sequence
  500A2-hmtIgG1-CD80
MLYTSQLLGLLLFWISASRSDIVLTQTPATLSLIPGERVTMTCKTSQNIGTILHWYHQKPKEAPRALIKYASQSIPGIPSRFSGSGSETDFILSINNLEPDDIGIYYCQQSRSWPVTFGPGTKLEIKRGGGGSGGGGSGGGGSQVKLQQSGSELGKPGASVKLSCKTSGYIFTDHYISWVKQKPGESLQWIGNVYGGNGGTSYNQKFQGKATLTVDKISSTAYMELSSLTSEDSAIYYCARRPVATGHAMDYWGQGIQVTVSSDLEPKSSDKTHTSPPSPAPELLGGSSVFLFPPKPKDTLMISRTPEVTCVVVDVSHEDPEVKFNWYVDGVEVHNAKTKPREEQYNSTYRVVSVLTVLHQDWLNGKEYKCKVSNKALPAPIEKTISKAKGQPREPQVYTLPPSRDELTKNQVSLTCLVKGFYPSDIAVEWESNGQPENNYKTTPPVLDSDGSFFLYSKLTVDKSRWQQGNVFSCSVMHEALHNHYTQKSLSLSPGKADPSNLLPSWAITLISVNGIFVICCLTYCFAPRCRERRRNERLRRESVRPV

SEQ ID NO: 488 - DNA, 1521 bp, Artificial sequence; identical to SEQ ID NO: 273
  2H7 scFv MTH(SSS) WTCH2CH3

SEQ ID NO: 489 - protein, 500 aa, Artificial sequence
  2H7 scFv MTH(SSS) WTCH2CH3
MDFQVQIFSFLLISASVIIARGQIVLSQSPAILSASPGEKVTMTCRASSSVSYMHWYQQKPGSSPKPWIYAPSNLASGVPARFSGSGSGTSYSLTISRVEAEDAATYYCQQWSFNPPTFGAGTKLELKDGGGSGGGGSGGGGSSQAYLQQSGAELVRPGASVKMSCKASGYTFTSYNMHWVKQTPRQGLEWIGAIYPGNGDTSYNQKFKGKATLTVDKSSSTAYMQLSSLTSEDSAVYFCARVVYYSNSYWYFDVWGTGTTVTVSSDQEPKSSDKTHTSPPSPAPELLGGPSVFLFPPKPKDTLMISRTPEVTCVVVDVSHEDPEVKTHWYVDGVEVHNAKTKPREEQYNSTYRVVSVLTVLHQDWLNGKEYKCKVSNKALPAPIEKTISKAKGQPREPQVYTLPPSRDELTKNQVSLTCLVKGFYPSDIAVEWESNGQPENNYKTTPPVLDSDGSFFLYSKLTVDKSRWQQGNVFSCSVMHEALHNHYTQKSLSLSPGK

SEQ ID NO: 490 - DNA, 39 bp, Artificial sequence; identical to SEQ ID NO: 277
  Primer

SEQ ID NO: 491 - DNA, 51 bp, Artificial sequence; identical to SEQ ID NO: 276
  Primer

SEQ ID NO: 492 - DNA, 64 bp, Artificial sequence; identical to SEQ ID NO: 275
  Primer

SEQ ID NO: 493 - DNA, 52 bp, Artificial sequence; identical to SEQ ID NO: 278
  Primer

SEQ ID NO: 494 - DNA, 56 bp, Artificial sequence; identical to SEQ ID NO: 279
  Primer

SEQ ID NO: 495 - DNA, 30 bp, Artificial sequence; identical to SEQ ID NO: 280
  Primer

SEQ ID NO: 496 - DNA, 54 bp, Artificial sequence; identical to SEQ ID NO: 281
  Primer

SEQ ID NO: 497 - DNA, 50 bp, Artificial sequence; identical to SEQ ID NO: 282
  Primer

SEQ ID NO: 498 - DNA, 51 bp, Artificial sequence; identical to SEQ ID NO: 289
  Primer

SEQ ID NO: 499 - DNA, 1536 bp, Artificial sequence; identical to SEQ ID NO: 283
  2H7 scFv IgAHIGG WTCH2CH3

SEQ ID NO: 500 - protein, 505 aa, Artificial sequence
  2H7 scFv IgAHIGG WTCH2CH3
MDFQVQIFSFLLISASVIIARGQIVLSQSPAILSASPGEKVTMTERASSSVSYMHWYQQKPGSSPKPWIYAPSNLASGVPARFSGSGSGTSYSLTISRVEAEDAATYYCQQWSFNPPTFGAGTKLELKDGGGSGGGGSGGGGSSQAYLQQSGAELVRPGASVKMSCKASGYTFTSYNMHWVKQTPRQGLEWIGAIYPGNGDTSYNQKFKGKATLTVDKSSSTAYMQLSSLTSEDSAVYFCARVVYYSNSYWYFDVWGTGTTVTVSDQPVPSTPPTPSPSTPPTPSPSCAPELLGGPSVFLFPPKPKDTLMISRTPEVTCVVVDVSHEDPEVKTHWYVDGVEVHNAKTKPREEQYNSTYRVVSVLTVLHQDWLNGKEYKCKVSNKALPAPIEKTISKAKGQPREPQVYTLPPSRDELTKNQVSLTCLVKGFYPSDIAVEWESNGQPENNYKTTPPVLDSDGSFFLYSKLTVDKSRWQQGNVFSCSVMHEALHNHYTQKSLSLSPGK

SEQ ID NO: 501 - DNA, 1584 bp, Artificial sequence; identical to SEQ ID NO: 285
  2H7 scFv IgAH IgACH2CH3

SEQ ID NO: 502 - protein, 522 aa, Artificial sequence
  2H7 scFv IgAH IgACH2CH3
MDFQVQIFSFLLISASVIIARGQIVLSQSPAILSASPGEKVTMTCRASSSVSYMHWYQQKPGSSPKPWIYAPSNLASGVPARFSGSGSGTSYSLTISRVEAEDAATYYCQQWSFNPPTFGAGTKLELKDGGGSGGGGSGGGGSSQAYLQQSGAELVRPGASVKMSCKASGYTFTSYNMHWVKQTPRQGLEWIGAIYPGNGDTSYNQKFKGKATLTVDKSSSTAYMQLSSLTSEDSAVYFCARVVYYSNSYWYFDVWGTGTTVTVSSDQPVPSTPPTPSPSTPPTPSPSCCHPRLSLHRPALEDLLLGSEAILTCTLTGLRDASGVTFTWTPSSGKSAVQGPPDRDLCGCYSVSSVLPGCAEPWNHGKTFTCTAAYPESKTPLTATLSKSGFLTTITPEVHLLPPPSEELALNELVTLTCLARGFSPKDVLVRWLQGSQELPREKYLTWASRQEPSQGTTTFAVTSILRVAAEDWKKGDTFSCMVGHEALPLAFTQKTIDRLAGKPTHVNVSVVMAEVDGTCY

SEQ ID NO: 503 - DNA, 775 bp, Artificial sequence; identical to SEQ ID NO: 287
  IgA hinge-CH2CH3

SEQ ID NO: 504 - protein, 254 aa, Artificial sequence
  IgA hinge-CH2CH3
DQPVPSTPPTPSPSTPPTPSPSCCHPRLSLHRPALEDLLLGSEAILTCTLTGLRDASGVTFTWTPSSGKSAVQGPPDRDLCGEYSVSSVLPGCAEPWNHGKTFTCTAAYPESKTPLTATLSKSGNTFRPEVHLLPPPSEELALNELVTLTELARGFSPKDVLVRWLQGSQELPREKYLTWASRQEPSQGTTTFAVTSILRVAAEDWKKGDTFSEMVGHEALPLAFTQKTIDRLAGKPTHVNVSVVMAEVDGTCY

SEQ ID NO: 505 - DNA, 428 bp, Artificial sequence
  Human J Chain
agatctcaagaagatgaaaggattgttcttgttgacaacaaatgtaagtgtgcccggattacttccaggatcatccgttcttcgaagatcctaatgaggacattgtggagagaaacatccgaattattgttcctctgaacaacagggagaatatctctgatcccacctcaccattgagaaccagatttgtgtaccatttgtctgacctcagctgtaaaaaatgtgatcctacagaagtggagctggataatcagatagttactgctacccagagcaatatctgtgatgaagacagtgctacagagacctgctacacttatgacagaaacaagtgctacacagctgtggtcccactcgtatatggtggtgagaccaaaatggtggaaacagccttaaccccagatgcctgctatcctgactaatctaga

SEQ ID NO: 506 - protein, 139 aa, Artificial sequence
  Human J Chain
RSQEDERIVLVDNKCKCARITSRIIRSSEDPNEDIVERNIRIIVPLNNRENISDPTSPLRTRFVYHLSDLSCKKCDPTEVELDNQIVTATQSNICDEDSATCTCYTYDRNKCYTAVVPLVYGGCTKMVETALTPDACYP

SEQ ID NO: 507 - DNA, 36 bp, Artificial sequence; identical to SEQ ID NO: 292
  Primer

SEQ ID NO: 508 - DNA, 35 bp, Artificial sequence
  Primer
gttgtttctagattagtcaggatagcaggcattgg

SEQ ID NO: 509 - protein, 4 aa, Artificial Sequence
  synthetic peptide
GTCY

SEQ ID NO: 510 - DNA, 763 bp, Artificial sequence
  IgAH IgAT4
tgatcagccagttccctcaactccacctaccccatctccctcaactccacctaccccatctccctcatgctgccacccccgactgtcactgcaccgaccggccctcgaggacctgctcttaggttcagaagcgatcctcacgtgcacactgaccggcctgagagatgcctcaggtgtcaccttcacctggacgccctcaagtgggaagagcgctgttcaaggaccacctgaccgtgacctctgtggctgctacagcgtgtccagtgtcctgccgggctgtgccgagccatggaaccatgggaagaccttcacttgcactgctgcctaccccgagtccaagaccccgctaaccgccaccctctcaaaatccggaaacacattccggcccgaggtccacctgctgccgccgccgtcggaggagctggccctgaacgagctggtgacgctgacgtgcctggcacgtggcttcagccccaaggatgtgctggttcgctggctgcaggggtcacaggagctgccccgcgagaagtacctgacttgggcatcccggcaggagcccagccagggcaccaccaccttcgctgtgaccagcatactgcgcgtggcagccgaggactggaagaagggggacaccttctcctgcatggtgggccacgaggccctgccgctggccttcccacagaagaccatcgaccgcttggcgggtaaacccacccatgtcaatgtgtctgttgtcatggcggaggtggactgataatctaga

SEQ ID NO: 511 - protein, 248 aa, Artificial sequence
  IgAH IgAT4
DVPSTPPTPSPSTPPTPSPSCCHPRLSLHRPALEDLLLGSEAILTCTLTGLRDASGVTFTWTPSSGKSAVQGPPDRDLCGCYSVSSVLPGCAEPWNHGKTFTCTAAYPESKTPLTATLSKSGNTFRPEVHLLPPPSEELALNELVTLTELARGFSPKDVLVRWLQGSQELPREKYLTWASRQEPSQGTTTFAVTSILRVAAEDWKKGDTFSCMVGHEALPLAFTQKTIDRLAGKPTHVNVSVVMAEVD

SEQ ID NO: 512 - DNA, 45 bp, Artificial sequence; identical to SEQ ID NO: 297
  Primer

SEQ ID NO: 513 - DNA, 44 bp, Artificial sequence
  Primer
gttgtttctagattatcatttacccgccaagcggtcgatggttt

SEQ ID NO: 514 - DNA, 1571 bp, Artificial sequence
  2H7scFvIgAHIgAT4
aagcttgccgccatggattttcaagtgcagattttcagcttcctgctaatcagtgcttcagtcataattgccagaggacaaattgttcttcccagtctccagcaatcctgtctgcatctccaggggagaaggtcacaatgacttgcagggccagctcaagtgtaagttacatgcactggtaccagcagaagccaggatcctcccccaaaccctggatttatgccccatccaacctggcttctggagtccctgctcgcttcagtggcagtgggtctgggacctcttactctctcacaatcagcagagtggaggctgaagatgctgccacttattactgccagcagtggagttttaacccacccacgttcggtgctgggaccaagctggagctgaaagatggcggtggctcgggcggtggtggatctggaggaggtgggagctctcaggcttatctacagcagtctggggctgagctggtgaggcctggggcctcagtgaagatgtcctgcaaggcttctggctacacatttaccagttacaatatgcactgggtaaagcagacacctagacagggcctggaatggattggagctatttatccaggaaatggtgatacttcctacaatcagaagttcaagggcaaggccacactgactgtagacaaatcctccagcacagcctacatgcagctcagcagcctgacatctgaagactctgcggtctatttctgtgcaagagtggtgtactatagtaactcttactggtacttcgatgtctggggcacagggaccacggtcaccgtctcttctgatcagccagttccctcaactccacctaccccatctccctcaactccacctaccccatctccctcatgctgccacccccgactgtcactgcaccgaccggccctcgaggacctgctcttaggttcagaagcgatcctcacgtgcacactgaccggcctgagagatgcctcaggtgtcaccttcacctggacgccctcaagtgggaagagcgctgttcaaggaccacctgaccgtgacctctgtggctgctacagcgtgtccagtgtcctgccgggctgtgccgagccatggaaccatgggaagaccttcacttgcactgctgcctaccccgagtccaagaccccgctaaccgccaccctctcaaaatccggaaacacattccggcccgaggtccacctgctgccgccgccgtcggaggagctggccctgaacgagctggtgacgctgacgtgcctggcacgtggcttcagccccaaggatgtgctggttcgctggctgcaggggtcacaggagctgccccgcgagaagtacctgacttgggcatcccggcaggagcccagccagggcaccaccaccttcgctgtgaccagcatactgcgcgtggcagccgaggactggaagaagggggacaccttctcctgcatggtgggccacgaggccctgccgctggccttcacacagaagaccatcgaccgcttggcgggtaaacccacccatgtcaatgtgtctgttgtcatggcggaggtggactgataatctaga

SEQ ID NO: 515 - protein, 516 aa, Artificial sequence
  2H7scFvIgAHIgAT4
MDFQVQIFSFLLISASVIIARGQIVLSQSPAILSASPGEKVTMTCRASSSVSYMHWYQQKPGSSPKPWIYAPSNLASGVPARFSGSGSGTSYSLTISRVEAEDAATYYEQQWSFNPPTFGAGTKLELKDGGGSGGGGSGGGGSSQAYLQQSGAELVRPGASVKMSEKASGYTFTSYNMHWVKQTPRQGLEWIGAIYPGNGDTSYNQKFKGKATLTVDKSSSTAYMQLSSLTSEDSAVYFEARVVYYSNSYWYFDVWGTGTTVTVSSDQPVPSTPPTPSPSTPPTPSPSCCHPRLSLHRPALEDLLLGSEAILTCTLTGLRDASGVTFTWTPSSGKSAVQGPPDRDLCGCYSVSSVLPGCACPWNHGKTFTCTAAYPESKTPLTATLSKSGNTFRPEVHLLPPPSEELALNELVTLTCLARGFSPKDVLVRWLQGSQELPREKYLTWASRQEPSQGTTTFAVTSILRVAAEDWKKGDTFSCMVGHEALPLAFTQKTIDRLAGKPTHVNVSVVMAEVD

SEQ ID NO: 516 - protein, 28 aa, Artificial sequence
  Synthetic peptide
PTHVNVSVVMAEVDPTHVNVSVVMAEVD

SEQ ID NO: 517 - DNA, 709 bp, Artificial sequence; identical to SEQ ID NO: 302
  IgAH IgAT18

SEQ ID NO: 518 - protein, 235 aa, Artificial sequence
  IgAH IgAT18
DQPVPSTPPTPSPSTPPTPSPSCCHPRLSLHRPALEDLLLGSEAILTCTHGLRDASGVTFTWTPSSGKSAVQGPPDRDLCGCYSVSSVLPGCACPWNHGKTFTCTAAYPESKTPLTATLSKSGNTFRPEVHLLPPPSEELALNELVTLTCLARGFSPKDVLVRWLQGSQELPREKYLTWASRQEPSQGTTTFAVTSILRVAAEDWKKGDTFSCMVGHEALPLAFTQKTIDRLAGK

SEQ ID NO: 519 - DNA, 1518 bp, Artificial sequence; identical to SEQ ID NO: 304
  2H7 scFv IgAH IgAT18

SEQ ID NO: 520 - protein, 502 aa, Artificial sequence
  2H7 scFv IgAH IgAT18
MDFQVQIFSFLISASVIIARGQIVLSQSPAILSASPGEKVTMTCRASSSVSYMHWYQQKPGSSPKPWIYAPSNLASGVPARFSGSGSGTSYSLTISRVEAEDAATYYCQQWSFNPPTFGAGTKLELKDGGGSGGGGSGGGGSSQAYLQQSGAELVRPGASVKMSCKASGYTFTSYNMHWVKQTPRQGLEWIGAIYPGNGDTSYNQKFKGKATLTVDKSSSTAYMQLSSLTSEDSAVYFCARVVYYSNSYWYFDVWGTGTTVTVSSDQPVPSTPPTPSPSTPPTPSPSCCHPRLSLHRPALEDLLLGSEAILTCTLTGLRDASGVTFTWTPSSGKSAVQGPPDRDLCGCYSVSSVLPGCACPWNHGKTFTCTAAYPESKTPLTATLSKSGNTFRPEVHLLPPPSEELALNELVTLTCLARGFSPKDVLVRWLQGSQELPREKYLTWASRQEPSQGTTTFAVTSILRVAAEDWKKGDTFSCRNVGHEALPLAFTQKTIDRLAGK

SEQ ID NO: 521 - DNA, 924 bp, Artificial sequence; identical to SEQ ID NO: 306
  CTLA-4 IgGWTH WTCH2CH3

SEQ ID NO: 522 - protein, 375 aa, Artificial sequence
  CTLA-4 IgGWTH WTCH2CH3
MGVLTQRTLLSLVALLFPSMASMAMHVAQAVVLASSRGTASFVCEYASPGKATEVRVTVLRQADSQVTEVCAATYMMGNEHFLDDSICTGTSSGNQVNHIQGLRAMDTGLYICKVELMYPPPYYLGIGNGTQIYVIDPEPCPDSDQPKSCDKTHTCPPCPAPELLGGPSVFLFPPKPKDTLMISRTPEVTCVVVDVSHEDPEVKFNWYVDGVEVHNAKTKPREEQYNSTYRVVSVHVLHQDWLNGKEYKCKVSNKALPAPIEKTISKAKGQPREPQVYTLPPSRDEHKNQVSLTCLVKGFYPSDIAVEWESNGQPENNYKTTPPVLDSDGSFFLYSKLTVDKSRWQQGNVFSCSVMHEALHNHYTQKSLSLSPGK

SEQ ID NO: 523 - DNA, 453 bp, Artificial sequence; identical to SEQ ID NO: 308
  OncoM leader peptide + CTLA4 EC

SEQ ID NO: 524 - protein, 151 aa, Artificial sequence
  OncoM leader peptide + CTLA4 EC
MGVLLTQRTLLSLVLALLFPSMASMAMHVAQPAVVLASSRGTASFVCEYASPGKATEVRVTVLRQADSQVTEVCAATYMMGNELTFLDDSICTGTSSGNQVNLTIQGLRAMDTGLYICKVELMYPPPYYLGIGNGTQIYVIDPEPCPDSDQ

SEQ ID NO: 525 - DNA, 75 bp, Artificial sequence; identical to SEQ ID NO: 311
  OncoM leader peptide

SEQ ID NO: 526 - protein, 22 aa, Artificial sequence
  OncoM leader peptide
MGVLLTQRTLLSLVLALLFPSM

SEQ ID NO: 527 - DNA, 372 bp, Artificial sequence; identical to SEQ ID NO: 313
  Human CTLA4 EC

SEQ ID NO: 528 - protein, 126 aa, Artificial sequence
  Human CTLA4 EC
AMHVAQPAVVLASSRGTASFVCEYASPGKATEVRVTVLRCLADSQVTEVCAATYMTGFLELTFLDDSICTGTSSGNQVNLTIQGLRAMDTGLYICKVELMYPPPYYLGIGNGTQIYVIDPEPCPDS

SEQ ID NO: 529 - DNA, 1149 bp, Artificial sequence; identical to SEQ ID NO: 315
  CTLA4 IgGMTH(SSS) MTCH2CH3

SEQ ID NO: 530 - protein, 383 aa, Artificial sequence
  CTLA4 IgGMTH(SSS) MTCH2CH3
MGVLLTQRTLLSLVLALLFPSMASMAMHVAQPAVVLASSRGTASFVCEYASPGKATEVRVTVLRQADSQVTEVCAATYMMGNELTFLDDSICTGTSSGNQVNLTIQGLRAMDTGLYICKVELMYPPPYYLGIGNGTQIYVIDPEPCPDSDQPKSSDKTHTSPPSPAPELLGGSSVFLFPPKPKDTLMISRTPEVTCVVVDVSHEDPEVKFFIWYVDGVEVHNAKTKPREEQYNSTYRVVSVLTVLHQDWLNGKEYKCKVSNKALPAPIEKTISKAKGQPREPQVYTLPPSRDELTKNQVSLTCLVKGFYPSDIAVEWESNGQPENNYKTTPPVLDSDGSFFLYSKLTVDKSRWQQGNVFSCSVMHEALHNHYTQKSLSLSPGK

SEQ ID NO: 531 - DNA, 1218 bp, Artificial sequence
  CTLA-4 IgAH IgACH2CH3
atgggggtactgctcacacagaggacgctgctcagtctggtccttgcactcctgtttccaagcatggcgagcatggcaatgcacgtggcccagcctgctgtggtactggccagcagccgaggcatcgccagctttgtgtgtgagtatgcatctccaggcaaagccactgaggtccgggtgacagtgcttcggcaggctgacagccaggtgactgaagtctgtgcggcaacctacatgatggggaatgagttgaccttcctagatgattccatctgcacgggcacctccagtggaaatcaagtgaacctcactatccaaggactgagggccatggactcgggactctacatctgcaaggtggagctcatgtacccaccgccatactacctgggcataggcaacggaacccagatttatgtaattgatccagaaccgtgcccagattctgatcagccagttccctcaactccacctaccccatctccctcaactccacctaccccatctccctcatgctgccacccccgactgtcactgcaccgaccggccctcgaggacctgctcttaggttcagaagcgatcctcacgtgcacactgaccggcctgagagatgcctcaggtgtcaccttcacctggacgccctcaagtgggaagagcgctgttcaaggaccacctgaccgtgacctctgtggctgctacagcgtgtccagtgtcctgccgggctgtgccgagccatggaaccatgggaagaccttcacttgcactgctgcctaccccgagtccaagaccccgctaaccgccaccctctcaaaatccggaaacacattccggcccgaggtccacctgctgccgccggtcggaggagctggccctgaacgagctggtgacgctgacgtgcctggcacgtggcttcagccccaaggatgtgctggttgctggctgcaggggtcacaggagctgccccgcgagaagtacctgacttgggcatcccggcaggagcccagccagggcaccaccaccttcgctgtgaccagcatactgcgcgtggcagccgaggactggaagaagggggacaccttctcctgcatggtgggccacgaggccctgccgctggccttcacacagaagaccatcgaccgcttggcgggtaaacccacccatgtcaatgtgtctgttgtcatggcggaggtggacggcacctgctactgataatctaga

SEQ ID NO: 532 - protein, 402 aa, Artificial sequence
  CTLA-4 IgAH IgACH2CH3
MGVLLTQRTLLSLVLALLFPSMASMAMHVAQPAVVLASSRGTASFVCEYASPGKATEVRVTVLRQADSQVTEVCAATYMMGNELTFLDDSICTGTSSGNQVNHIQGLRAMDTGLYICKVELMYPPPYYLGIGNGTQIYVIDPEPCPDSDQPVPSTPPTPSPSTPPTPSPSCCHPRLSLHRPALEDLLLGSEAILTCTLTGLRDASGVTFTWIPSSGKSAVQGPPDRDLCGCYSVSSVLPGCACPWNHGKTFTCTAAYPESKTPLTATLSKSGNTFRPEVHLLPPPSEELALNELVTLTCLARGFSPKDVLVRWLQGSQELPREKYLTWASRQEPSQGTTTFAVTSILRVAAEDWKKGDTFSCMVGHEALPLAFIQKTIDRLAGKPTHVNVSVVMAEVDGTCY

SEQ ID NO: 533 - DNA, 1209 bp, Artificial sequence; identical to SEQ ID NO: 319
  CTLA-4 IgAH IgA-T4

SEQ ID NO: 534 - protein, 400 aa, Artificial sequence
  CTLA-4 IgAH IgA-T4
MGVLLTQRTLLSLVLALLFPSMASMANTHVAQPAVVLASSRGTASFVCEYASPGKATEVRVTVLRQADSQVTEVCAATYMMGNELTFLDDSICTGTSSGNQVNLTIQGLRAMDTGLYICKVELMYPPPYYLGIGNGTQIYVIDPEPCPDSDQPVPSTPPTPSPSTPPTPSPSCCHPRLSLHRPALEDLLLGSEAILTCTLTGLRDASGVTFIWTPSSGKSAVQGPPDRDLCGCYSVSSVLPGCACPWNHGKTFTCTAAYPESKTPLTATLSKSGNTFRPEVHLLPPPSEELALNELVTLTCLARGFSPKDVLVRWLQGSQELPREKYLTWASRQEPSQGTTTFAVTSILRVAAEDWKKGDTFSCMVGHEALPLAFTQKTIDRLAGKPTHVNVSVVMAEVD

SEQ ID NO: 535 - DNA, 327 bp, Artificial sequence
  IgG1 CH2 P238S
cctgaactcctggggggatcgtcagtcttcctcttccccccaaaacccaaggacaccctcatgatctcccggacccctgaggtcacatgcgtggtggtggacgtgagccacgaagaccctgaggtcaagttcaactggtacgtggacggcgtggaggtgcataatgccaagacaaagccgcgggaggagcagtacaacagcacgtaccgtgtggtcagcgtctcaccgtcctgcaccaggactggctgaatggcaaggagtacaagtgcaaggtctccaacaaagccctcccagcccccatcgagaaaaccatctccaaagccaaag

SEQ ID NO: 536 - protein, 109 aa, Artificial sequence; identical to SEQ ID NO: 322
  IgG1 CH2 P238S

SEQ ID NO: 537 - protein, 10 aa, Artificial sequence
  Synthetic peptide
PAPELLGGPS

SEQ ID NO: 538 - protein, 10 aa, Artificial sequence
  Synthetic peptide
PAPELLGGSS

SEQ ID NO: 539 - DNA, 35 bp, Artificial sequence; identical to SEQ ID NO: 325
  Primer

SEQ ID NO: 540 - DNA, 49 bp, Artificial sequence; identical to SEQ ID NO: 326
  Primer

SEQ ID NO: 541 - DNA, 51 bp, Artificial sequence; identical to SEQ ID NO: 327
  Primer

SEQ ID NO: 542 - DNA, 996 bp, Artificial sequence; identical to SEQ ID NO: 328
  Hu IgE Fc(CH2-CH3-CH4)

SEQ ID NO: 543 - protein, 334 aa, Artificial sequence
  Hu IgE Fc(CH2-CH3-CH4)
DHVESRDFTPPTVKILQSSEDGGGHFPPTIQLLELVSGYTPGTINITWLEDGQVMDVDLSTASTTQEGELASTQSELTLSQKHWLSDRTYTEQVTYQGHTFEDSTKKEADSNPRGVSAYLSRPSPFDLFIRKSPTITELVVDLAPSKGTVFLLTWSRASGKPVNHSTRKEEKQRNGTLTVTSTLPVGTRDWIEGCTYQERVTHPHLPRALMRSTTKTSGPRAAPEVYAFATPEWPGSRDKRTLAELIQNFRNPEDISVQWLHNEVQLPDARHSTTQPRKTKGSGFFVFSRLEVTRAEWEQKDEFIERAVHCAASPSQTVQRAVSVFLPGKADPS

SEQ ID NO: 544 - DNA, 63 bp, Artificial sequence; identical to SEQ ID NO: 330
  Primer

SEQ ID NO: 545 - DNA, 52 bp, Artificial sequence; identical to SEQ ID NO: 278
  Primer

SEQ ID NO: 546 - DNA, 89 bp, Artificial sequence
  Primer
gttgttgatcaggagcccaaatcttctgacaaaactcacacatctccaccgtccccagcacctgaatcctgggtggaccgtcagtctcc

SEQ ID NO: 547 - DNA, 339 bp, Artificial sequence; identical to SEQ ID NO: 335
  1D8 VH

SEQ ID NO: 548 - protein, 113 aa, Artificial sequence
  1D8 VH
QVQLKCAGPGLVQPTQTLSLTCTVSGFSLTSDGVHWIRQPPGKGLEWMGTTYYDGGTDYNSAIKSRLSISRDTSKSQVFLKINSLQTDDTAMYYCARIHFDYWGQGVMVTVSS

SEQ ID NO: 549 - DNA, 321 bp, Artificial sequence; identical to SEQ ID NO: 336
  1D8 VL

SEQ ID NO: 550 - protein, 107 aa, Artificial sequence; identical to SEQ ID NO: 342
  1D8 VL

SEQ ID NO: 551 - DNA, 785 bp, Artificial sequence; identical to SEQ ID NO: 337
  1D8 scFv

SEQ ID NO: 552 - protein, 258 aa, Artificial sequence
  1D8 scFv
MDFQVQIFSFLLISASVIMSRGVDIVLTQSPTTIAASPGEKVTITCRASSSVSYMYWYQQKSGASPKLWIYDTSKLASGVPNRFSGSGSGTSYSLAINTMETEDAATYYCQQWSSTPLTFGSGTKLEIKRGGGGSGGGGSGGGGSQVQLKCAGPGLVQPTQTLSLTCTVSGFSLTSDGVHWIRQPPGKGLEWMGTTYYDGGTDYNSAIKSRLSISRDTSKSQVFLKINSLQTDDTAMYYCARIHFDYWGQGVMVTVSS

SEQ ID NO: 553 - DNA, 1491 bp, Artificial sequence; identical to SEQ ID NO: 338
  1D8 scFv IgGWTH WTCH2CH3

SEQ ID NO: 554 - protein, 492 aa, Artificial sequence
  1D8 scFv IgGWTH WTCH2CH3
MDFQVQIFSFLLISASVIMSRGVDIVLTQSPTTIAASPGEKVTITCRASSSVSYMYWYQQKSGASPKLWIYDTSKLASGVPNRFSGSGSGTSYSLAINTMETEDAATYYCQQWSSTPLTFGSGTKLEIKRGGGGSGGGGSGGGGSQVQLKCAGPGLVQPTQTLSLTCTVSGFSLTSDGVHWIRQPPGKGLEWMGTTYYDGGTDYNSAIKSRLSISRDTSKSQVFLKINSLQTDDTAMYYCARIHFDYWGQGVMVTVSSDQEPKSCDKTHTCPPCPAPELLGGPSVFLFPPKPKDTLMISRTPEVTCVVVDVSHEDPEVKTHWYVDGVEVHNAKTKPREEQYNSTYRVVSVLTVLHQDWLNGKEYKCKVSNKALPAPIEKTISKAKGQPREPQVYTLPPSRDELTKNQVSLTCLVKGFYPSDIAVEWESNGQPENNYKTTPPVLDSDGSFFLYSKLTVDKSRWQQGNVFSCSVMHEALHNHYTQKSLSLSPGK

SEQ ID NO: 555 - DNA, 1645 bp, Artificial sequence
  1D8 scFv IgGMTH MTCH2CH3-CD80
aagcttatggattttcaagtgcagattttcagcttcctgctaatcagtgcttcagtcataatgtccagaggagtcgacattgtgctcactcagtctccaacaaccatagctgcatctccaggggagaaggtcaccatcacctgccgtgccagctccagtgtaagttacatgtactggtaccagcagaagtcaggcgcctcccctaaactctggatttatgacacatccaagctggcttctggagttccaaatcgcttcagtggcagtgggtctgggacctcttattctctcgcaatcaacaccatggagactgaagatgctgccacttattactgtcagcagtggagtagtactccgctcacgttcgggtctgggaccaagctggagatcaaacggggtggcggtggctcgggcggtggtgggtcgggtggcggcggatctcaggtgcagctgaaggaggcaggacctggcctggtgcaaccgacacagaccctgtccctcacatgcactgtctctgggttctcattaaccagcgatggtgtacactggattcgacagcctccaggaaagggtctggaatggatgggaataatatattatgatggaggcacagattataattcagcaattaaatccagactgagcatcagcagggacacctccaagagccaagttttcttaaaaatcaacagtctgcaaactgatgacacagccatgtattactgtgccagaatccactttgattactggggccaaggagtcatggtcacagtctcctctgatctggagcccaaatcttctgacaaaactcacacaagcccaccgagcccagcacctgaactcctggggggatcgtcagtcttcctcttccccccaaaacccaaggacaccctcatgatctcccggacccctgaggtcacatgcgtggtggtggacgtgagccacgaagaccctgaggtcaagttcaactggtacgtggacggcgtggaggtgcataatgccaagacaaagccgcgggaggagcagtacaacagcacgtaccgtgtggtcagcgtcctcaccgtcctgcaccaggactggctgaatggcaaggagtacaagtgcaaggtctccaacaaagccctcccagcccccatcgagaaaaccatctccaaagccaaagggcagccccgagaaccacaggtgtacaccctgcccccatcccgggatgagctgaccaagaaccaggtcagcctgacctgcctggtcaaaggcttctatcccagcgacatcgccgtggagtgggagagcaatgggcagccggagaacaactacaagaccacgcctcccgtgctggactccgacggctccttcttcctctacagcaagctcaccgtggacaagagcaggtggcagcaggggaacgtcttctcatgctccgtgatgcatgaggctctgcacaaccactacacgcagaagagcctctccctgtctccgggtaaagcggatccttcgaacctgctcccatcctgggccattaccttaatctcagtaaatggaatttttgtgatatgctgcctgacctactgctttgccccaagatgcagagagagaaggaggaatgagagattgagaagggaaagtgtacgccctgtataaatcgata

SEQ ID NO: 556 - protein, 548 aa, Artificial sequence
  1D8 scFv IgG MTH MTCH2CH3-CD80
MDFQVQIFSFLLISASVIMSRGVDIVLTQSPTTIAASPGEKVTITCRASSSVSYMYWYQQKSGASPKLWIYDTSKLASGVPNRFSGSGSGTSYSLAINTMETEDAATYYCQQWSSTPLTFGSGTKLEIKRGGGGSGGGGSGGGGSQVQLKCAGPGLVQPTQTLSLTCTVSGFSLTSDGVHWIRQPPGKGLEWMGTTYYDGGTDYFLSAIKSRLSISRDTSKSQVFLKIFLSLQTDDTAMYYCARIHFDYWGQGVMVTVSSDLEPKSSDKTHTSPPSPAPELLGGSSVFLFBPKPKDTLMISRTPEVTCVVVDVSHEDPEVKFHWYVDGVEVHNAKTKPREEQYNSTYRVVSVLTVLHQDWLNGKEYKCKVSNKALPAPIEKTISKAKGQPREPQVYTLPPSRDELTKFLQVSLTCLVKGFYPSDIAVEWESNGQPENNYKTTPPVLDSDGSFFLYSKLTVDKSRWQQGFLVFSCSVMHEALHFLHYTQKSLSLSPGKADPSNLLPSWAITLISVNGIFVICCLTYCFAPRCRERRRNERLRRESVRPV

SEQ ID NO: 557 - DNA, 1644 bp, Artificial sequence
  1D8 scFv IgGWTH WTCH2CH3-CD80
aagcttatggattttcaagtgcagattttcagcttcctgctaatcagtgcttcagtcataatgtccagaggagtcgacattgtgctcactcagtctccaacaaccatagctgcatctccaggggagaaggtcaccatcacctgccgtgccagctccagtgtaagttacatgtactggtaccagcagaagtcaggcgcctcccctaaactctggatttatgacacatccaagctggcttctggagttccaaatcgcttcagtggcagtgggtctgggacctcttattctctcgcaatcaacaccatggagactgaagatgctgccacttattactgtcagcagtggagtagtactccgctcacgttcgggtctgggaccaagctggagatcaaacggggtggcggtggctcgggcggtggtgggtcgggtggcggcggatctcaggtgcagctgaaggaggcaggacctggcctggtgcaaccgacacagaccctgtccctcacatgcactgtctctgggttctcattaaccagcgatggtgtacactggattcgacagcctccaggaaagggtctggaatggatgggaataatatattatgatggaggcacagattataattcagcaattaaatccagactgagcatcagcagggacacctccaagagccaagttttcttaaaaatcaacagtctgcaaactgatgacacagccatgtattactgtgccagaatccactttgattactggggccaaggagtcatggtcacagtctcctctgatctggagcccaaatcttgtgacaaaactcacacatgcccaccgtgcccagcacctgaactcctggggggaccgtcagtcttcctcttccccccaaaacccaaggacaccctcatgatctcccggacccctgaggtcacatgcgtggtggtggactgagccacgaagaccctgaggtcaagttcaactggtacgtggacggcgtggaggtgcataatgccaagacaaagccgcgggaggagcagtacaacagcacgtaccgtgtggtcagcgtcctcaccgtcctgcaccaggactggctgaatggcaaggagtacaagtgcaaggtctccaacaaagccctcccagcccccatcgagaaaaccatctccaaagccaaagggcagccccgagaaccacaggtgtacaccctgcccccatcccgggatgagctgaccaagaaccaggtcagcctgacctgcctggtcaaaggcttctatcccagcgacatcgccgtggagtgggagagcaatgggcagccggagaacaactacaagaccacgcctcccgtgctggactccgacggctccttcttcctctacagcaagctcaccgtggacaagagcaggtggcagcaggggaacgtcttctcatgctccgtgatgcatgaggctctgcacaaccactacacgcagaagagcctctccctgtctccgggtaaagcggatccttcgaacctgctcccatcctgggccattaccttaatctcagtaaatggaatttttgtgatatgctgcctgacctactgctttgccccaagatgcagagagagaaggaggaatgagagattgagaagggaaagtgtacgccctgtataaatcgata

SEQ ID NO: 558 - protein, 544 aa, Artificial sequence
  1D8 scFv IgGWTH WTCH2CH3-CD80
MDFQVQIFSFLLISASVIMSRGVDIVLTQSPTTIAASPGEKVTITCRASSSVSYMYWYQQKSGASPKLWIYDTSKLASGVPNRFSGSGSGTSYSLAINTMETEDAATYYCQQWSSTPLTFGSGTKLEIKLGGGGSGGGGSGGGGSQVQLKCAGPGLVQPTQTLSLTCTVSGFSLTSDGVHWIRQPPGKGLEWMGIIYYDGGTDYFLSAIKSRLSISRDTSKSQVFLKINSLQTDDTAMYYCARIHFDYWGQGVMVTVSSDLEPKSCDKTHTCPPCPAPELLGGPSVFLFPPKPKDTLMISRTPEVTCVVDVSHEDPEVKFNWYVDGVEVHNAKTKPREEQYNSTYRVVSVLTVLHQDWLNGKEYKCKVSNKALPAPIEKTISKAKGQPREPQVYTLPPSRDELTKNQVSLTCLVKGFYPSDIAVEWESNGQPENNYKTTPPVLDSDGSFFLYSKLTVDKSRWQQGFLVFSCSVMHEALHNHYTQKSLSLSPGKADPSNLLPSWAITLISVNGIFVICCLTYCFAPRCRERRRNERLRRESVRPV

SEQ ID NO: 559 - DNA, 1527 bp, Artificial sequence; identical to SEQ ID NO: 347
  Anti human CD3 scFv WTH WTCH2CH3

SEQ ID NO: 560 - protein, 510 aa, Artificial sequence
  Anti human CD3 scFv WTH WTCH2CH3
MDFQVQIFSFLLISASVIMSRGVDIQMTQTTSSLSASLGDRVTISCRASQDIRNLYLNWYQQKPDGTVKLLIYYTSRLHSGVPSRFSGSGSGTDYSLTIANLQPEDIATYFCQQGNTLPWTFGGGTKLVTKRELGGGGSGGGGSGGGGSIDEVQLQQSGPELVKPGASMSCKASGYSFTGYIVNWLKQSHGKNLEWIGLIFLPYKGLTTYFLQKFLGKATLTVDKSSSTAYMELLSLTSEDSAVYYCARSGYYGDSDWYFDVWGAGTTVTVSSDQEPKSCDKTHTCPPCPAPELLGGPSVFLFPPKPKDTHMSRTPEVTCVVVDVSHEDPEVKMWYVDGVEVHNAKTKPREEQYNSTYRVVSVLTVLHQDWLFLGKEYKCKVSFLKALPAPIEKTISKAKGQPREPQVYTLPPSRDELTKNQVSLTCLVKGFYPSDIAVEWESFLGQPEFLFLYKTTPPVLDSDGSFFLYSKLTVDKSLWQQGNVFSCSVMHEALHNHYTQKSLSLSPGK

SEQ ID NO: 561 - DNA, 2322 bp, Artificial sequence
  2H7-40.2.220 scFv MTH(SSS) MTCH2WTCH3
aagcttgccgccatggattttcaagtgcagattttcagcttcctgctaatcagtgcttcagtcataattgccagaggacaaattgttctctcccagtctccagcaatcctgtctgcatctccaggggagaaggtcacaatgacttgcagggccagctcaagtgtaagttacatgcactggtaccagcagaagccaggatcctcccccaaaccctggatttatgccccatccaacctggcttctggagtccctgctcgcttcagtggcagtgggtctgggacctcttactctctcacaatcagcagagtggaggctgaagatgctgccacttattactgccagcagtggagttttaacccacccacgttcggtgctgggaccaagctggagctgaaaggtggcggtggctcgggcggtggtggatctggaggaggtgggagctctcaggcttatctacagcagtctggggctgagctggtgaggcctggggcctcagtgaagatgtcctgcaaggcttctggctacacatttaccagttacaatatgcactgggtaaagcagacacctagacagggcctggaatggattggagctatttatccaggaaatggtgatacttcctacaatcagaagttcaagggcaaggccacactgactgtagacaaatcctccagcacagcctacatgcagctcagcagcctgacatctgaagactctgcggtctatttctgtgcaagagtggtgtactatagtaactcttactggtacttcgatgtctggggcacagggaccacggtcaccgtctcttctgatcaatccaactctgaagaagcaaagaaagaggaggccaaaaaggaggaagccaagaaatctaacagcgtcgacattgttctgactcagtctccagccaccctgtctgtgactccaggagatagagtctctctttcctgcagggccagccagagtattagcgactacttacactggtatcaacaaaaatcacatgagtctccaaggcttctcatcaaatatgcttcccattccatctctgggatcccctccaggttcagtggcagtggatcagggtcagatttcactctcagtatcaacagtgtggaacctgaagatgttggaatttattactgtcaacatggtcacagctttccgtggacgttcggtggaggcaccaagctggaaatcaaacggggtggcggtggctcgggcggaggtgggtcgggtggcggcggatctcagatccagttggtgcaatctggacctgagctgaagaagcctggagagacagtcaggatctcctgcaaggcttctgggtatgccttcacaactactggaatgcagtgggtgcaagagatgccaggaaagggtttgaagtggattggctggataaacaccccactctggagtgccaaaatatgtagaagacttcaaggacggtttgccttctctttggaaacctctgccaacactgcatatttacagataagcaacctcaaagatgaggacacggctacgtatttctgtgagatccgggaatggtaactatgacctggctactttgcttactggggccaagggacactggtcactgtctctgatcaggagcccaaatcttctgacaaaactcacacatccccaccgtccccagcacctgaactcctggggggatcgtcagtcttcctcttccccccaaaacccaaggacaccctcatgatctcccggacccctgaggtcacatgcgtggtggtggacgtgagccacgaagaccctgaggtcaagttcaactggtacgtggacggcgtggaggtgcataatgccaagacaaagccgcgggaggagcagtacaacagcacgtaccgtgtggtcagcgtcctcaccgtcctgcaccaggactggctgaatggcaaggagtacaagtgcaaggtctccaacaaagccctcccagcccccatcgagaaaacaatctccaaagccaaagggcagccccgagaaccacaggtgtacaccctgcccccatcccgggatgagctgaccaagaaccaggtcagcctgacctgcctggtcaaaggcttctatcccagcgacatcgccgtggagtgggagagcaatgggcagccggagaacaactacaagaccacgcctcccgtgctggactccgacggctccttcttcctctacagcaagctcaccgtggacaagagcaggtggcagcaggggaacgtcttctcatgctccgtgatgcatgaggctctgcacaaccactacacgcagaagagcctctccctgtctccgggtaaatgatctaga

SEQ ID NO: 562 - protein, 778 aa, Artificial sequence
  2H7-40.2.220 scFv MTH(SSS) MTCH2WTCH3
MDFQVQIFSFLLISASVIIARGQIVLSQSPAILSASPGEKVTMTCRASSSVSYMHWYQQKPGSSPKPWIYAPSNLASGVPARFSGSGSGTSYSLTISRVEAEDAATYYCQQWSFNPPTFGAGTKLELKGGGGSGGGGSGGGGSSQAYLQQSGACLVRPGASVKMSCKASGYTFTSYNMHWVKQTPRQGLEWIGAIYPGFLGDTSYFLQKFKGKATLTVDKSSSTAYMQLSSLTSEDSAVYFEARVVYYSNSYWYFDVWGTGTTVTVSSDQSNSEEAKKEEAKKEEAKKSFLSVDIVLTQSPATLSVTPGDLWSLSCRASQSISDYLHWYQQKSHESPRLLIKYASHSISGIPSRFSGSGSGSDFTLSIFLSVEPEDVGIYYEQHGHSFPWTFGGGTKLEIKRGGGGSGGGGSGGGGSQIQLVQSGPELKKPGCTVTISCKASGYAFTTTGMQWVQEMPGKGLKWIGWIFLTPLWSAKICRRLQGRFAFSLETSANTAYIQISNLKDEDTATYFCVRSGNGNYDLAYFAYWGQGTLVTVSDQEPKSSDKTHTSPPSPAPELLGGSSVFLFPPKPKDTLMISRTPEVTCVVVDVSHEDPEVKTHWYVDGVEVHFLAKTKPREEQYFLSTYRVVSVLTVLHQDWLNGKEYKEKVSNKALPAPIEKTISKAKGQPREPQVYTLPPSRDELTKNQVSLTCLVKGFYPSDIAVEWESFLGQPEFLFLYKTTPPVLDSDGSFFLYSKLTVDKSRWQQGNVFSCSVMHEALHNHYTQKSLSLSPGK

SEQ ID NO: 563 - DNA, 423 bp, Artificial sequence; identical to SEQ ID NO: 353
  5B9 VH with leader peptide

SEQ ID NO: 564 - DNA, 366 bp, Artificial sequence; identical to SEQ ID NO: 354
  5B9 VH with leader peptide

SEQ ID NO: 565 - protein, 140 aa, Artificial sequence
  5B9 VH with leader peptide
MAVLGLLFCLVTFPSCVLSQVQLKQSGPGLVQSSQSLSITCTVSGFSLTTYAVHWVRQSPGKGLEWLGVIWSGGITDYNAAFSRLSITKDDSKSQVFFKMNSLQPNDTAIYYCARNGGDNYPYYYAMDYWGQGTSVTVSS

SEQ ID NO: 566 - protein, 122 aa, Artificial sequence
  5B9 VH lacking leader peptide
QVQLKQSGPGLVQSSQSLSITCTVSGFSLTTYAVHWVRQSPGKGLEWLGVIWSGGITDYNAAFISRLSLTKDDSKSQVFFKMNSLQPNDTAIYYCARNGGDNYPYYYAMDYWGQGTSVTVSS

SEQ ID NO: 567 - DNA, 397 bp, Artificial sequence
  5B9 VL
atgaggttctctgctcagcttctggggctgcttgtgctctggatccctggatccactgcagatattgtgatgacgcaggctgcattctccaatccagtcactcttggaacatcagcttccatctcctgcaggtctagtaagagtctcctacatagtaatggcatcacttatttgtattggtatctgcagaagccaggccagtctcctcagctcctgatttatcagatgtccaaccttgcctcaggagtcccagacaggttcagtagcagtgggtcaggaactgatttcacactgagaatcagcagagtggaggctgaggatgtgggtgtttattactgctcaaaatctagaacttccgctcacgttcggtgctgggaccaagctggagctgaaacgg

SEQ ID NO: 568 - protein, 133 aa, Artificial sequence; identical to SEQ ID NO: 361
  5B9 VL

SEQ ID NO: 569 - DNA, 825 bp, Artificial sequence; identical to SEQ ID NO: 356
  5B9 scFV

SEQ ID NO: 570 - protein, 270 aa, Artificial sequence
  5B9 scFV
MRFSAQLLGLLVLWIPGSTADIVMTQAAFSNPVTLGTSASISCRSSKSLLHSNGITYLYWYLQKPGQSPQLLIYQMSNLASGVPDRFSSSGSGTDFTLRISRVEAEDVGVYYCAQNLELPLTFGAGTKLELKRGGGGSGGGGSGGGGSSQVQLKQSGPGLVQSSQSLSITCTVSGFSLTTYAVHWVRQSPGKGLEWLGVIWSGGITDYNAAFSRLSITKDDSKSQVFFKMNSLQPNDTAIYYCARNGGDNYPYYYAMDYWGQGTSVTVSS

SEQ ID NO: 571 - DNA, 1696 bp, Artificial sequence; identical to SEQ ID NO: 358
  5B9 scFV-hmtIgG1-hCD80

SEQ ID NO: 572 - protein, 557 aa, Artificial sequence
  Synthetic peptide
MRFSAQLLGLLVLWIPGSTADIVMTQAAFSNPVTLGTSASISCRSSKSLLHSNGITYLYWYLQKPGQSPQLLIYQMSNLASGVPDRFSSSGSGTDFTLRISRVEAEDVGVYYCAQNLELPLTFGAGTKLELKRGGGGSGGGGSGGGGSSQVQLKQSGPGLVQSSQSLSITCTVSGFSLTTYAVHWVRQSPGKGLEWLGVIWSGGITDYNAAFISRLSITIKDDSKSQVFFKMNSLQPNDTALYYCARNGGDNYPYYYAMDYWGQGTSVTVSSDLEPKSSDKTHTSPPSPAPELLGGSSVFLFPPKPKDTLMISRTPEVTCVVVDVSHEDPEVKFNWYVDGVEVHNAKTKPREEQYNSTYRVVSVLTVLHQDWLNGKEYKCKVSNKALPAPIEKTISKAKGQPREPQVYTLPPSRDELTKNQVSLTCLVKGFYPSDIAVEWESNGQPENNYKTTPPVLDSDGSFFLYSKLTVDKSRWQQGNVFSCSVMHEALHNHYTQKSLSLSPGKADPSNLLPSWAITLISVNGIFVICCLTYCFAPRCRERRRNERLRRESVRPV

SEQ ID NO: 573 - DNA, 1683 bp, Artificial sequence
  2e12 scFV WTHCH2CH3-CD80
aagcttatggattttcaagtgcagattttcagcttcctgctaatcagtgcttcagtcataatgtccagaggagtcgacattgtgctcacccaatctccagcttctttggctgtgtctctaggtcagagagccaccatctcctgcagagccagtgaaagtgttgaatattatgtcacaagtttaatgcagtggtaccaacagaaaccaggacagccacccaaactcctcatctctgctgcatccaacgtagaatctggggtccctgccaggtttagtggcagtgggtctgggacagacttcagcctcaacatccatcctgtggaggaggatgatattgcaatgtatttctgtcagcaaagtaggaaggttccttggacgttcggtggaggcaccaagctggaaatcaaacggggtggcggtggctcgggcggaggtgggtcgggtggcggcggatctcaggtgcagctgaaggagtcaggacctggcctggtggcgccctcacagagcctgtccatcacatgcaccgtctcagggttctcattaaccggctatggtgtaaactgggttcgccagcctccaggaaagggtctggagtggctgggaatgatatggggtgatggaagcacagactataattcagctctcaaatccagactgagcatcaccaaggacaactccaagagccaagttttcttaaaaatgaacagtctgcaaactgatgacacagccagatactactgtgccagagatggttatagtaactttcattactatgttatggactactggggtcaaggaacctcagtcaccgtctcctcagatctggagcccaaatcttgtgacaaaactcacacatgcccaccgtgcccagcacctgaactcctggggggaccgtcagtcttcctcttccccccaaaacccaaggacaccctcatgatctcccggacccctgaggtcacatgcgtggtggtggacgtgagccacgaagaccctgaggtcaagttcaactggtacgtggacggcgtggaggtgcataatgccaagacaaagccgcgggaggagcagtacaacagcacgtaccgtgtggtcagcgtcctcaccgtcctgcaccaggactggctgaatggcaaggagtacaagtgcaaggtctccaacaaagccctcccagcccccatcgagaaaaccatctccaaagccaaagggcagccccgagaaccacaggtgtacaccctgcccccatcccgggatgagctgaccaagaaccaggtcagcctgacctgcctggtcaaaggcttctatcccagcgacatcgccgtggagtgggagagcaatgggcagccggagaacaactacaagaccacgcctcccgtgctggactccgacggctccttcttcctctacagcaagctcaccgtggacaagagcaggtggcagcaggggaacgtcttctcatgctccgtgatgcatgaggctctgcacaaccactacacgcagaagagcctctccctgtctccgggtaaagcggatccttcgaacctgctcccatcctgggccattaccttaatctcagtaaatggaatttttgtgatatgctgcctgacctactgctttgccccaagatgcagagagagaaggaggaatgagagattgagaagggaaagtgtacgccctgtataaatcgat

SEQ ID NO: 574 - protein, 558 aa, Artificial sequence
  2e12 scFV WTHCH2CH3-CD80
MDFQVQIFSFLLISASVIMSRGVDIVLTQSPASLAVSLGQRATISCRASESVEYYVTSLMQWYQQKPGQPPKLLISAASNVESGVPARFSGSGSGTDFSLNIHPVEEDDIAMYFCQQSRKVPWTFGGGTKLEIKRGGGGSGGGGSGGGGSQVQLKESGPGLVAPSQSLSITCTVSGFSLTGYGVNWVRQPPGKGLEWLGMIWGDGSTDYNSALKSRLSITKDNSKSQVFLKMNSLQTDDTARYYCARDGYSNTHYYVMDYWGQGTSVTVSSDLEPKSCDKTHTCPPCPAPELLGGPSVFLFPPKPKDTLMISRTPEVTCVVVDVSHEDPEVKFNWYVDGVEVHNAKTKPREEQYNSTYRVVSVLTVLHQDWLNGKEYKCKVSFLKALPAPIEKTISKAKGQPREPQVYTLPPSRDELTKNQVSLTCLVKGFYPSDIAVEWESNGQPENNYKTTPPVLDSDGSFFLYSKLTVDKSRWQQGFLVFSCSVMHEALHNHYTQKSLSLSPGKADPSNLLPSWAITLISVNGIFVICCLTYCFAPRCRERRRNERLRRESVRPV

SEQ ID NO: 575 - DNA, 1800 bp, Artificial sequence; identical to SEQ ID NO: 333
  2H7 IgE Fc CH2CH3CH4

SEQ ID NO: 576 - protein, 592 aa, Artificial sequence
  2H7 IgE Fc CH2CH3CH4
MDFQVQIFSFLLISASVIIARGQIVLSQSPAILSASPGEKVTMTCRASSSVSYMHWYQQKPGSSPKPWIYAPSNLASGVPARFSGSGSGTSYSLTISRVEAEDAATYYCQQWSFNPPTFGAGTKLELKGGGGSGGGGSGGGGSSQAYLQQSGAELVRPGASVKMSCKASGYTFTSYNMHWVKQTPRQGLEWIGAIYPGNGDTSYNQKTKGKATLTVDKSSSTAYMQLSSLTSEDSAVYFCARVVYYSNSYWYFDVWGTGTTVTVSDHVCSRDFIPPTVKILQSSCDGGGHFPPTIQFLCLVSGYTPGTINIWLEDGEQVMDVDLSTASTTQEGELASTQSELTLSQKHWLSDRTYTCQVTYQGHTFEDSTKKCADSNPRGVSAYLSRPSPFDLFIRKSPTITCLVVDLAPSKGTVNLTWSRASGKPVNHSTRKEEKQRNGTLTVTSTLPVGTRDWIEGCTYQCRVTHPHLPRALMRSTTKTSGPRAAPEVYAFATPEWPGSRDKRTLACLIQNFMPEDISVQWLHNEVQLPDARHSTTQPRKTKGSGFFVFSRLEVTRAEWEQKDEFLCRAVHCAASPSQTVQRAVSVNPGK

SEQ ID NO: 577 - DNA, 1521 bp, Artificial sequence; identical to SEQ ID NO: 351
  2H7 scFv MH(SSS) MCH2WTCH3

SEQ ID NO: 578 - protein, 508 aa, Artificial sequence
  2H7 scFv MH(SSS) MCH2WTCH3
MDFQVQIFSFLLISASVIIARGQIVLSQSPAILSASPGEKVTMTCRASSSVSYMHWYQQKPGSSPKPWIYAPSNLASGVPARFSGSGSGTSYSLTISRVEAEDAATYYCQQWSFNPPTFGAGTKLELKDGGGSGGGGSGGGGSSQAYLQQSGACLVRPGASVKMSCKASGYTFISYNMHWVKQTPRQGLEWIGAIYPGNGDTSYNQKTKGKATLTVDKSSSTAYMQLSSLTSEDSAVYFCARVVYYSNSYWYFDVWGRGTTVTVSSDQEPKSSDKTHTSPPSPAPELLGGSSVFLFPPKPKDTLRNISRTPEVTCVVVDVSHEDPEVKFRIWYVDGVEVHNAKTKPREEQYNSTYRVVSVLTVLHQDWLNGKEYKCKVSNKALPAPIEKTISKAKGQPREPQVYTLPPSRDELTKNQVSLTCLVKGFYPSDIAVEWESFLGQPEFLFLYKTTPPVLDSDGSFFLYSKLTVDKSRWQQGFLVFSCSVFLTHEALHNHYTQKSLSLSPGK

SEQ ID NO: 579 - DNA, 1536 bp, Artificial sequence; identical to SEQ ID NO: 357
  5B9 scFv MTH WTCH2CH3

SEQ ID NO: 580 - protein, 505 aa, Artificial sequence
  5B9 scFv MTH WTCH2CH3
MRFSAQLLGLLVLWIPGSTADIVMTQAAFSNPVTLGTSASISCRSSKSLLHSNGITYLYWYLQKPGQSPQLLIYQMSNLASGVPDRESSSGSGTDFTLRISRVEAEDVGVYYCAQNLELPLTFGAGTKLELKRGGGGSGGGGSGGGGSSQVQLKQSGPGLVQSSQSLSITCTVSGFSLTTYAVHWVRQSPGKGLEWLGVIWSGGITDYNAAFISRLSITKDDSKSQVFFKMNSLQPNDTAIYYCARNGGDNYPYYYAMDYWGQGTSVTVSSDQEPKSSDKTHTSPPSPAPELLGGPSVFLFPPKPKDTLMISRTPEVTCVVVDVSHEDPEVKFNWYVDGVEVHNAKTKPREEQYNSTYRVVSVLTVLHQDWLNGKEYKCKVSNKALPAPIEKTISKAKGQPREPQVYTLPPSRDELTKNQVSLTCLVKGFYPSDIAVEWESNGQPENNYKTTPPVLDSDGSFFLYSKLTVDKSRWQQGNVFSCSVMHEALHNHYTQKSLSLSPGK

SEQ ID NO: 581 - DNA, 1520 bp, Artificial sequence
  2H7 ScFV MTH(CSS) WTCH2CH3
aagcttgccgccatggattttcaagtgcagattttcagcttcctgctaatcagtgcttcagtcataattgccagaggacaaattgttctctcccagtctccagcaatcctgtctgcatctccaggggagaaggtcacaatgacttgcagggccagctcaagtgtaagttacatgcactggtaccagcagaagccaggatcctcccccaaaccctggatttatgccccatccaacctggcttctggagtccctgctcgcttcagtggcagtgggtctgggacctcttactctctcacaatcagcagagtggaggctgaagatgctgccacttattactgccagcagtggagttttaacccacccacgttcggtgctgggaccaagctggagctgaaagatggcggtggctcgggcggtggtggatctggaggaggtgggagctctcaggcttatctacagcagtctggggctgagctggtgaggcctggggcctcagtgaagatgtcctgcaaggcttctggctacacatttaccagttacaatatgcactgggtaaagcagacacctagacagggcctggaatggattggagctatttatccaggaaatggtgatacttcctacaatcagaagttcaagggcaaggccacactgactgtagacaaatcctccagcacagcctacatgcagctcagcagcctgacatctgaagactctgcggtctatttctgtgcaagagtggtgtactatagtaactcttactggtacttgatgtctggggcacagggaccacggtcaccgtctcttctgatcaggagcccaaatcttgtgacaaaactcacacatccccaccgtccccagcacctgaactcctggggggaccgtcagtcttcctcttccccccaaaacccaaggacaccctcatgatctcccggacccctgaggtcacatgcgtggtggtggacgtgagccacgaagaccctgaggtcaagttcaactggtacgtggacggcgtggaggtgcataatgccaagacaaagccgcgggaggagcagtacaacagcacgtaccgtgtggtcagcgtcctcaccgtcctgcaccaggactggctgaatggcaaggagtacaagtgcaaggtctccaacaaagccctcccagcccccatcgagaaaacaatctccaaagccaaagggcagccccgagaaccacaggtgtacaccctgcccccatcccgggatgagctgaccaagaaccaggtcagcctgacctgcctggtcaaaggcttctatcccagcgacatcgccgtggagtgggagagcaatgggcagccggagaacaactacaagaccacgcctcccgtgctggactccgacggctccttcttcctctacagcaagctcaccgtggacaagagcaggtggcagcaggggaacgtcttctcatgctccgtgatgcatgaggctctgcacaaccactacacgcagaagagcctctccctgtctccgggtaaatgatctaga

SEQ ID NO: 582 - protein, 501 aa, Artificial sequence
  2H7 ScFV MTH(CSS) WTCH2CH3
MDFQVQIFSFLLISASVIIARGQIVLSQSPAILSASPGEKVTMTCRASSSVSYMHWYQQKPGSSPKPWIYAPSNLASGVPARFSGSGSGTSYSLTISRVEAEDAATYYCQQWSFNPPTFGAGTKLELKDGGGSGGGGSGGGGSSQAYLQQSGACLVRPGASVKMSCKASGYTFTSYNMHWVKQTPRQGLEWIGAIYPGNGDTSYNQKFKGKATLTVDKSSSTAYMQLSSLTSEDSAVYFCARVVYYSNSYWYFDVWGTGTTVTVSSDQEPKSCDKTHTSPPSPAPELLGGPSVFLFPPKPKDTLMISRTPEVTCVVVDVSHEDPEVKFNWYVDGVEVHNAKTKPREEQYNSTYRVVSVLTVLHQDWLFLGKEYKCKVSNKALPAPIEKTISKAKGQPREPQVYTLPPSRDELTKNQVSLTCLVKGFYPSDIAVEWESNGQPENNYKTTPPVLDSDGSFFLYSKLTVDKSRWQQGNVFSCSVMHEALHNHYTQKSLSLSPGK

SEQ ID NO: 583 - DNA, 1521 bp, Artificial sequence
  2H7 ScFv MTH(SCS) WTCH2CH3
aagcttgccgccatggattttcaagtgcagattttcagcttcctgctaatcagtgcttcagtcataattgccagaggacaaattgttctctcccagtctccagcaatcctgtctgcatctccaggggagaaggtcacaatgacttgcagggccagctcaagtgtaagttacatgcactggtaccagcagaagccaggatcctcccccaaaccctggatttatgccccatccaacctggcttctggagtccctgctcgcttcagtggcagtgggtctgggacctcttactctctcacaatcagcagagtggaggctgaagatgctgccacttattactgccagcagtggagttttaacccacccacgttcggtgctgggaccaagctggagctgaaagatggcggtggctcgggcggtggtggatctggaggaggtgggagctctcaggcttatctacagcagtctggggctgagctggtgaggcctggggcctcagtgaagatgtcctgcaaggcttctggctacacatttaccagttacaatatgcactgggtaaagcagacacctagacagggcctggaatggattggagctatttatccaggaaatggtgatacttcctacaatcagaagttcaagggcaaggccacactgactgtagacaaatcctccagcacagcctacatgcagctcagcagcctgacatctgaagactctgcggtctatttctgtgcaagagtggtgtactatagtaactcttactggtacttcgatgtctggggcacagggaccacggtcaccgtctcttctgatcaggagcccaaatcttctgacaaaactcacacatgcccaccgtccccagcacctgaactcctggggggaccgtcagtcttcctcttccccccaaaacccaaggacaccctcatgatctcccggacccctgaggtcacatgcgtggtggtggacgtgagccacgaagaccctgaggtcaagttcaactggtacgtggacggcgtggaggtgcataatgccaagacaaagccgcgggaggagcagtacaacagcacgtaccgtgtggtcagcgtcctcaccgtcctgcaccaggactggctgaatggcaaggagtacaagtgcaaggtctccaacaaagccctcccagcccccatcgagaaaacaatctccaaagccaaagggcagccccgagaaccacaggtgtacaccctgcccccatcccgggatgagctgaccaagaaccaggtcagcctgacctgcctggtcaaaggcttctatcccagcgacatcgccgtggagtgggagagcaatgggcagccggagaacaactacaagaccacgcctcccgtgctggactccgacggctccttcttcctctacagcaagctcaccgtggacaagagcaggtggcagcaggggaacgtcttctcatgctccgtgatgcatgaggctctgcacaaccactacacgcagaagagcctctccctgtctccgggtaaatgatctaga

SEQ ID NO: 584 - protein, 502 aa, Artificial sequence
  2H7 ScFv MTH(SCS) WTCH2CH3
MDFQVQIFSFLLISASVIIARGQIVLSQSPAILSASPGEKVTMTCRASSSVSYMHWYQQKPGSSPKPWIYAPSNLASGVPARFSGSGSGTSYSLTISRVEAEDAATYYCQQWSFNPPTFGAGTKLELKDGGGSGGGGSGGGGSSQAYLQQSGACLVRPGASVKMSCKASGYTFTSYNMHWVKQTPRQGLEWIGAIYPGNGDTSYNQKTKGKATLTVDKSSSTAYMQLSSLTSEDSAVYFCARVVYYSNSYWYFDVWGTGTTVTVSSDQEPKSSDKTHTCPPSPAPELLGGPSVFLFPPKPKDTLMISRTPEVTCVVVDVSHEDPEVKFNWYVDGVEVHNAKTKPREEQYNSTYRVVSVLTVLHQDWLNGKEYKCKVSFLKALPAPIEKTISKAKGQPREPQVYTLPPSRDELTKNQVSLTCLVKGFYPSDIAVEWESNGQPENNYKTTPPVLDSDGSFFLYSKLTVDKSRWQQGFLVFSCSVMHEALHNHYTQKSLSLSPGK

SEQ ID NO: 585 - DNA, 1521 bp, Artificial sequence
  2H7 scFv MTH(SSC) WTCH2CH3
aagcttgccgccatggattttcaagtgcagattttcagcttcctgctaatcagtgcttcagtcataattgccagaggacaaattgttctctcccagtctccagcaatcctgtctgcatctccaggggagaaggtcacaatgacttgcagggccagctcaagtgtaagttacatgcactggtaccagcagaagccaggatcctcccccaaaccctggatttatgccccatccaacctggcttctggagtccctgctcgcttcagtggcagtgggtctgggacctcttactctctcacaatcagcagagtggaggctgaagatgctgccacttattactgccagcagtggagttttaacccacccacgttcggtgctgggaccaagctggagctgaaagatggcggtggctcgggcggtggtggatctggaggaggtgggagctctcaggcttatctacagcagtctggggctgagctggtgaggcctggggcctcagtgaagatgtcctgcaaggcttctggctacacatttaccagttacaatatgcactgggtaaagcagacacctagacagggcctggaatggattggagctatttatccaggaaatggtgatacttcctacaatcagaagttcaagggcaaggccacactgactgtagacaaatcctccagcacagcctacatgcagctcagcagcctgacatctgaagactctgcggtctatttctgtgcaagagtggtgtactatagtaactcttactggtacttcgatgtctggggcacagggaccacggtcaccgtctcttctgatcaggagcccaaatcttctgacaaaactcacacatccccaccgtgcccagcacctgaactcctggggggaccgtcagtcttcctcttccccccaaaacccaaggacaccctcatgatctcccggacccctgaggtcacatgcgtggtggtggacgtgagccacgaagaccctgaggtcaagttcaactggtacgtggacggcgtggaggtgcataatgccaagacaaagccgcgggaggagcagtacaacagcacgtaccgtgtggtcagcgtcctcaccgtcctgcaccaggactggctgaatggcaaggagtacaagtgcaaggtctccaacaaagccctcccagcccccatcgagaaaacaatctccaaagccaaagggcagccccgagaaccacaggtgtacaccctgcccccatcccgggatgagctgaccaagaaccaggtcagcctgacctgcctggtcaaaggcttctatcccagcgacatcgccgtggagtgggagagcaatgggcagccggagaacaactacaagaccacgcctcccgtgctggactccgacggctccttcttcctctacagcaagctcaccgtggacaagagcaggtggcagcaggggaacgtcttctcatgctccgtgatgcatgaggctctgcacaaccactacacgcagaagagcctctccctgtctccgggtaaatgatctaga

SEQ ID NO: 586 - protein, 500 aa, Artificial sequence
  2H7 scFv MTH(SSC) WTCH2CH3
MDFQVQIFSFLLISASVIIARGQIVLSQSPAILSASPGEKVTMTCRASSSVSYMHWYQQKPGSSPKPWIYAPSNLASGVPARFSGSGSGTSYSLTISRVEAEDAATYYCQQWSFNPPTFGAGTKLELKDGGGSGGGGSGGGGSSQAYLQQSGAELVRPGASVKMSCKASGYTFTSYNMHWVKQTPRQGLEWIGAIYPGNGDTSYNQKFKGKATLTVDKSSSTAYMQLSSLTSEDSAVYFCARVVYYSNSYWYFDVWGTGTTVTVSSDQEPKSSDKTHTSPPCPAPELLGGPSVFLFPPKPKDTLMISRTPEVTCVVVDVSHEDPEVKFNWYVDGVEVHNAKTKPREEQYNSTYRVVSVLTVLHQDWLNGKEYKCKVSNKALPAPIEKTISKAKGQPREPQVYTLPPSRDELTKNQVSLTCLVKGFYPSDIAVEWESNGQPENNYKTTPPVLDSDGSFFLYSKLTVDKSRWQQGNVFSCSVMHEALHNHYTQKSLSLSPGK

SEQ ID NO: 587 - DNA, 44 bp, Artificial sequence; identical to SEQ ID NO: 390
  Primer

SEQ ID NO: 588 - DNA, 54 bp, Artificial sequence; identical to SEQ ID NO: 391
  Primer

SEQ ID NO: 589 - DNA, 63 bp, Artificial sequence; identical to SEQ ID NO: 392
  Primer

SEQ ID NO: 590 - DNA, 324 bp, Artificial sequence; identical to SEQ ID NO: 370
  HuIgG1 MTCH3Y405

SEQ ID NO: 591 - protein, 107 aa, Artificial sequence; identical to SEQ ID NO: 375
  HuIgG1 MTCH3Y405

SEQ ID NO: 592 - DNA, 324 bp, Artificial sequence; identical to SEQ ID NO: 371
  HuIgG1 MTCH3A405

SEQ ID NO: 593 - protein, 107 aa, Artificial sequence; identical to SEQ ID NO: 376
  HuIgG1 MTCH3A405

SEQ ID NO: 594 - DNA, 324 bp, Artificial sequence; identical to SEQ ID NO: 372
  HuIgG1 MTCH3A407

SEQ ID NO: 595 - protein, 107 aa, Artificial sequence; identical to SEQ ID NO: 377
  HuIgG1 MTCH3A407

SEQ ID NO: 596 - DNA, 324 bp, Artificial sequence; identical to SEQ ID NO: 373
  HuIgG1 MTCH3Y405A407

SEQ ID NO: 597 - protein, 107 aa, Artificial sequence; identical to SEQ ID NO: 378
  HuIgG1 MTCH3Y405A407

SEQ ID NO: 598 - DNA, 324 bp, Artificial sequence; identical to SEQ ID NO: 374
  HuIgG1 MTCH3A405A407

SEQ ID NO: 599 - protein, 107 aa, Artificial sequence; identical to SEQ ID NO: 379
  HuIgG1 MTCH3A405A407

SEQ ID NO: 600 - DNA, 1521 bp, Artificial sequence; identical to SEQ ID NO: 381
  2H7 scFv MTH(SSS) WTCH2MTCH3Y405

SEQ ID NO: 601 - protein, 506 aa, Artificial sequence
  2H7 scFv MTH(SSS) WTCH2MTCH3Y405
MDFQVQIFSFLLISASVIIARGQIVLSQSPAILSASPGEKVTMTCRASSSVSYMHWYQQKPGSSPKPWIYAPSNLASGVPARFSGSGSGTSYSLTISRVEAEDAATYYCQQWSFHPPTFGAGTKLELKDGGGSGGGGSGGGGSSQAYLQQSGAELVRPGASVKMSCKASGYTFTSYNMHWVKQTPRQGLEWIGAIYPGFLGDTSYFLQKFKGKATLTVDKSSSTAYLMQLSSLTSEDSAVYFCARVVYYSNSYWYFDVWGTGTTVTVSSDQEPKSSDKTHTSPPSPAPELLGGPSVFLFPPKPKDTLMISRTPEVTCVVVDVSHEDPEVKFNWYVDGVEVHNAKTKPREEQYNSTYRVVSVLTVLHQDWLFLGKEYKCKVSFLKALPAPIEKTISKAKGQPREPQVYTLPPSREEMTKNQVSLTCLVKGFYPSDIAVEWESNGQPEFLFLYKTTPPVDSDGSFYLYSKLTVDKSRWQQGNVFSCSVMHEALHNHYTQKSLSLSPGK

SEQ ID NO: 602 - DNA, 1515 bp, Artificial sequence; identical to SEQ ID NO: 380
  2H7 scFv MTH(SSS) WTCH2MTCH3A405

SEQ ID NO: 603 - protein, 502 aa, Artificial sequence
  2H7 scFv MTH(SSS) WTCH2MTCH3A405
MDFQVQIFSFLLISASVIIARGQIVLSQSPAILSASPGEKVTMTCRASSSVSYMHWYQQKPGSSPKPWIYAPSNLASGVPARFSGSGSGTSYSLTISRVEAEDAATYYCQQWSFNPPTFGAGTKLELKDGGGSGGGGSGGGGSSQAYLQQSGAELVRPGASVKMSCKASGYTFTSYNMHWVKQTPRQGLEWIGAIYPGNGDTSYNQKTKGKATLTVDKSSSTAYMQLSSLTSEDSAVYFCARVVYYSNSYWYFDVWGTGTTVTVSSDQEPKSSDKTHTSPPSPAPELLGGPSVFLFPPKPKDTLMISRTPEVTCVVVDVSHEDPEVKFRIWYVDGVEVHNAKTKPREEQYNSTYRVVSVLTVLHQDWLNGKEYKCKVSFLKALPAPIEKTISKAKGQPREPQVYTLPPSREEMTKNQVSLTCLVKGFYPSDIAVEWESNGQPENNYKTTPPVLDSDGSFALYSKLTVDKSRWQQGNVFSCSVMHEALHNHYTQKSLSLSPGK

SEQ ID NO: 604 - DNA, 1515 bp, Artificial sequence; identical to SEQ ID NO: 382
  2H7 scFv MTH(SSS) WTCH2MTCH3A407

SEQ ID NO: 605 - protein, 504 aa, Artificial sequence
  2H7 scFv MTH(SSS) WTCH2MTCH3A407
MDFQVQIFSFLLISASVIIARGQIVLSQSPAILSASPGEKVTMTCRASSSVSYMHWYQQKPGSSPKPWIYAPSNLASGVPARFSGSGSGTSYSLTISRVEAEDAATYYCQQWSLHPPTFGAGTKLELKDGGGSGGGGSGGGGSSQAYLQQSGACLVRPGASVKMSCKASGYTFTSYNMHWVKQTPRQGLEWIGAIYPGFLGDTSYFLQKFKGKATLTVDKSSSTAYMQLSSLTSEDSAVYFCARVVYYSNSYWYFDVWGTGTTVTVSSDQEPKSSDKTHTSPPSPAPELLGGPSVFLFPPKPKDTLMISRTPEVTCVVVDVSHEDPEVKFNWYVDGVEVHNAKTKPREEQYNSTYRVVSVLTVLHQDWLNGKEYKCKVSFLKALPAPIEKTISKAKGQPREPQVYTLPPSREEMTKNQVSLTCLVKGFYPSDIAVEWESNGQPENNYKTTPPVLDSDGSFFLASKLTVDKSRWQQGFLVFSCSVMHEALHNHYTQKSLSLSPGK

SEQ ID NO: 606 - DNA, 1515 bp, Artificial sequence; identical to SEQ ID NO: 383
  2H7 scFv MTH(SSS) WTCH2MTCH3Y405A407

SEQ ID NO: 607 - protein, 501 aa, Artificial sequence
  2H7 scFv MTH(SSS) WTCH2MTCH3Y405A407
MDFQVQIFSFLLISASVIIARGQIVLSQSPAILSASPGEKVTMTCRASSSVSYMHWYQQKPGSSPKPWIYAPSNLASGVPARFSGSGSGTSYSLTISRVEAEDAATYYCQQWSFRIPPTFGAGTKLELKDGGGSGGGGSGGGGSSQAYLQQSGACLVRPGASVKMSCKASGYTFISYNMHWVKQTPRQGLEWIGAIYPGNGDTSYNQKFKGKATLTVDKSSSTAYMQLSSLTSEDSAVYFCARVVYYSNSYWYFDVWGTGTTVTVSSDQEPKSSDKTHTSPPSPAPELLGGPSVFLFPPKPKDTLMISRTPEVTCVVVDVSHEDPEVKTHWYVDGVEVHNAKTKPREEQYNSTYRVVSVLTVLHQDWLNGKEYKCKVSNKALPAPIEKTISKAKGQPREPQVYTLPPSREEMTKNQVSLTCLVKGFYPSDIAVEWESNGQPENNYKTTPPVLDSDGSFYLASKLTVDKSRWQQGNVFSCSVMHEALHNHYTQKSLSLSPGK

SEQ ID NO: 608 - DNA, 1515 bp, Artificial sequence; identical to SEQ ID NO: 384
  2H7 scFv MTH(SSS) WTCH2MTCH3A405A407

SEQ ID NO: 609 - protein, 500 aa, Artificial sequence
  2H7 scFv MTH(SSS) WTCH2MTCH3A405A407
MDFQVQIFSFLLISASVIIARGQIVLSQSPAILSASPGEKVTMTCRASSSVSYMHWYQQKPGSSPKPWIYAPSNLASGVPARFSGSGSGTSYSLTISRVEAEDAATYYCQQWSFNPPTFGAGTKLELKDGGGSGGGGSGGGGSSQAYLQQSGACLVRPGASVKMSCKASGYTFTSYNMHWVKQTPRQGLEWIGAIYPGNGDTSYNQKFKGKATLTVDKSSSTAYMQLSSLTSEDSAVYFCARVVYYSNSYWYFDVWGTGTTVTVSSDQEPKSSDKTHTSPPSPAPELLGGPSVFLFPPKPKDTLMISRTPEVTCVVVDVSHEDPEVKFNWYVDGVEVHNAKTKPREEQYNSTYRVVSVLTVLHQDWLNGKEYKCKVSNLALPAPIEKTISKAKGQPREPQVYTLPPSREEMTKNQVSLTCLVKGFYPSDIAVEWESNGQPENNYKTTPPVLDSDGSFALASKLTVDKSRWQQGNVFSCSVMHEALHNHYTQKSLSLSPGK

SEQ ID NO: 610 - DNA, 1521 bp, Artificial sequence; identical to SEQ ID NO: 393
  2H7 scFv MTH(SCC) WTCH2CH3

SEQ ID NO: 611 - protein, 500 aa, Artificial sequence
  2H7 scFv MTH(SCC) WTCH2CH3
MDFQVQIFSFLLISASVIIARGQIVLSQSPAILSASPGEKVTMTCRASSSVSYMHWYQQKPGSSPKPWIYAPSNLASGVPARFSGSGSGTSYSLTISRVEAEDAATYYCQQWSFNPPTFGAGTKLELKDGGGSGGGGSGGGGSSQAYLQQSGACLVRPGASVKMSCKASGYTFTSYNMHWVKQTPRQGLEWIGAIYPGNGDTSYNQKFKGKATLTVDKSSSTAYMQLSSLTSEDSAVYFCARVVYYSNSYWYFDVWGTGTTVTVSSDQEPKSSDKTHTCPPCPAPELLGGPSVFLFPPKPKDTLMISRTPEVTCVVVDVSHEDPEVKFNWYVDGVEVHNAKTKPREEQYNSTYRVVSVLTVLHQDWLNGKEYKCKVSNKALPAPIEKTISKAKGQPREPQVYTLPPSRDELTKNQVSLTCLVKGFYPSDIAVEWESNGQPENNYKTTPPVLDSDGSFFLYSKLTVDKSRWQQGNVFSCSVMHEALHNHYTQKSLSLSPGK

SEQ ID NO: 612 - DNA, 1521 bp, Artificial sequence; identical to SEQ ID NO: 394
  2H7 scFv MTH(CSC) WTCH2CH3

SEQ ID NO: 613 - protein, 498 aa, Artificial sequence
  2H7 scFv MTH(CSC) WTCH2CH3
MDFQVQIFSFLLISASVIIARGQIVLSQSPAILSASPGEKVTMTCRASSSVSYMHWYQQKPGSSPKPWIYAPSNLASGVPARFSGSGSGTSYSLTISRVEAEDAATYYCQQWSFNPPTFGAGTKLELKDGGGSGGGGSGGGGSSQAYLQQSGACLVRPGASVKMSCKASGYTFTSYNMHWVKQTPRQGLEWIGAIYPGNGDTSYNQKFKGKATLTVDKSSSTAYMQLSSLTSEDSAVYFCARVVYYSNSYWYFDVWGTGTTVTVSSDQEPKSCDKTHTSPPCPAPELLGGPSVFLFPPKPKDTLMISRTPEVTCVVVDVSHEDPEVKFNWYVDGVEVHNAKTKPREEQYNSTYRVVSVLTVLHQDWLNGKEYKCKVSNKALPAPIEKTISKAKGQPREPQVYTLPPSRDELTKNQVSLTCLVKGFYPSDIAVEWESNGENNYKTTPPVLDSDGSFFLYSKLTVDKSRWQQGNVFSCSVMHEALHNHYTQKSLSLSPGK

SEQ ID NO: 614 - DNA, 1521 bp, Artificial sequence; identical to SEQ ID NO: 395
  2H7 scFv MTH(CCS) WTCH2CH3

SEQ ID NO: 615 - protein, 500 aa, Artificial sequence
  2H7 scFv MTH(CCS) WTCH2CH3
MDFQVQIFSFLLISASVIIARGQIVLSQSPAILSASPGEKVTMTCRASSSVSYMHWYQQKPGSSPKPWIYAPSNLASGVPARFSGSGSGTSYSLTISRVEAEDAATYYCQQWSFNPPTFGAGTKLELKDGGGSGGGGSGGGGSSQAYLQQSGAELVRPGASVKMSCKASGYTFTSYNMHWVKQTPRQGLEWIGAIYPGNGDTSYNQKTKGKATLTVDKSSSTAYMQLSSLTSEDSAVYFCARVVYYSNSYWYFDVWGTGTTVTVSSDQEPKSCDKTHTCPPSPAPELLGGPSVFLFPPKPKDFLMISRTPEVTCVVVDVSHEDPEVKTHWYVDGVEVHNAKTKPREEQYNSTYRVVSVLTVLHQDWLNGKEYKCKVSNKALPAPIEKTISKAKGQPREPQVYTLPPSRDELTKNQVSLTCLVKGFYPSDIAVEWESNGQPENNYKTTPPVLDSDGSFFLYSKLTVDKSRWQQGNVFSCSVMHEALHNHYTQKSLSLSPGK

SEQ ID NO: 616 - DNA, 766 bp, Artificial sequence
  2H7 scFv MTH(CCS) WTCH2CH3
tgatcagccagttccctcaactccacctaccccatctccctcaactccacctaccccatctccctcatgctgccacccccgactgtcactgcaccgaccggccctcgaggacctgctcttaggttcagaagcgatcctcacgtgcacactgaccggcctgagagatgcctcaggtgtcaccttcacctggacgccctcaagtgggaagagcgctgttcaaggaccacctgaccgtgacctctgtggctgctacagcgtgtccagtgtcctgccgggctgtgccgagccatggaaccatgggaagaccttcacttgcactgctgcctaccccgagtccaagaccccgctaaccgccaccctctcaaaatccggaaacacattccggcccgaggtccacctgctgccgccgccgtcggaggagctggccctgaacgagctggtgacgctgacgtgcctggcacgtggcttcagccccaaggatgtgctggttcgctggctgcaggggtcacaggagctgccccgcgagaagtacctgacttgggcatcccggcaggagcccagccagggcaccaccaccttcgctgtgaccagcatactgcgcgtggcagccgaggactggaagaagggggacaccttctcctgcatggtgggccacgaggccctgccgctggccttcacacagaagaccatcgaccgcttggcgggtaaacccacccatgtcaatgtgtctgttgtcatggcggaggtggacgcggatccttcgaac

SEQ ID NO: 617 - protein, 254 aa, Artificial sequence
  HuIgAHIgA-T4
DPVPSTPPTPSPSTPPTPSPSCCHPRLSLHRPALEDLLLGSEAILTCTLTGLRDASGVTFTWTPSSGKSAVQGPPDRDLCGCYSVSSVLPGCACPWNHGKTFTCTAAYPESKTPLTATLSKSGNTFRPEVHLLPPPSEELALNELVTLTCLARGFSPKDVLVRWLQGSQELPREKYLTWASRQEPSQGTTTFAVTSILRVAACDWKKGDTFSCMVGHEALPLAFTQKTIDRLAGKPTHVNVSVVMAEVDADPSN

SEQ ID NO: 618 - DNA, 766 bp, Artificial sequence; identical to SEQ ID NO: 616
  HuIgAHIgA-T4

SEQ ID NO: 619 - protein, 255 aa, Artificial sequence
  HuIgAHIgA-T4
DQPVPSTPPTPSPSTPPTPSPSCCHPRLSLHRPALEDLLLGSEAILTCTLTGLRDASGVTFTWTPSSGKSAVQGPPDRDLCGCYSVSSVLPGCACPWNHGKTFTCTAAYPESKTPLTATLSKSGNTFRPEVHLLPPPSEELALNELVTLTCLARGFSPKDVLVRWLQGSQELPREKYLTWASRQEPSQGTTTFAVTSILRVAACDWKKGDTFSCMVGHEALPLAFTQKTIDRLAGKPTHVNVSVVMAEVDADPSN

SEQ ID NO: 620 - DNA, 1697 bp, Artificial sequence
  1D8-IgAH IgAT4-CD80
aagcttatggattttcaagtgcagattttcagcttcctgctaatcagtgcttcagtcataatgtccagaggagtcgacattgtgctcactcagtctccaacaaccatagctgcatctccaggggagaaggtcaccatcacctgccgtgccagctccagtgtaagttacatgtactggtaccagcagaagtcaggcgcctcccctaaactctggatttatgacacatccaagctggcttctggagttccaaatcgcttcagtggcagtgggtctgggacctcttattctctcgcaatcaacaccatggagactgaagatgctgccacttattactgtcagcagtggagtagtactccgctcacgttcgggtctgggaccaagctggagatcaaacggggtggcggtggctcgggcggtggtgggtcgggtggcggcggatctcaggtgcagctgaaggaggcaggacctggcctggtgcaaccgacacagaccctgtccctcacatgcactgtctctgggttctcattaaccagcgatggtgtacactggattcgacagcctccaggaaagggtctggaatggatgggaataatatattatgatggaggcacagattataattcagcaattaaatccagactgagcatcagcagggacacctccaagagccaagttttcttaaaaatcaacagtctgcaaactgatgacacagccatgtattactgtgccagaatccactttgattactggggccaaggagtcatggtcacagtctcctctgatcagccagttccctcaactccacctaccccatctccctcaactccacctaccccatctccctcatgctgccacccccgactgtcactgcaccgaccggccctcgaggacctgctcttaggttcagaagcgatcctcacgtgcacactgaccggcctgagagatgcctcaggtgtcaccttcacctggacgccctcaagtgggaagagcgctgttcaaggaccacctgaccgtgacctctgtggctgctacagcgtgtccagtgtcctgccgggctgtgccgagccatggaaccatgggaagaccttcacttgcactgctgcctaccccgagtccaagaccccgctaaccgccaccctctcaaaatccggaaacacattccggcccgaggtccacctgctgccgccgccgtcggaggagctggccctgaacgagctggtgacgctgacgtgcctggcacgtggcttcagccccaaggatgtgctggttcgctggctgcaggggtcacaggagctgccccgcgagaagtacctgacttgggcatcccggcaggagcccagccagggcaccaccaccttcgctgtgaccagcatactgcgcgtggcagccgaggactggaagaagggggacaccttctcctgcatggtgggccacgaggccctgccgctggccttcacacagaagaccatcgaccgcttggcgggtaaacccacccatgtcaatgtgtctgttgtcatggcggaggtggacgcggatccttcgaacaacctgctcccatcctgggccattaccttaatctcagtaaatggaatttttgtgatatgctgcctgacctactgctttgccccaagatgcagagagagaaggaggaatgagagattgagaagggaaagtgtacgccctgtataaatcgatac

SEQ ID NO: 621 - protein, 560 aa, Artificial sequence
  1D8-IgAH IgAT4-CD80
MDFQVQIFSFLLISASVIMSRGVDIVLTQSPTTIAASPGEKVTITCRASSSVSYMYWYQQKSGASPKLWIYDTSKLASGVPNRFSGSGSGTSYSLAINTMETEDAATYYCQQWSSTPLTFGSGTKLEIKRGGGGSGGGGSGGGGSQVQLKCAGPGLVQPTQTLSLTCTVSGFSLTSDGVHWIRQPPGKGLEWMGTTYYDGGTDYNSAIKSRLSISRDTSKSQVFLKINSLQTDDTAMYYCARIHFDYWGQGVMVTVSSDQPVPSTPPTPSPSTPPTPSPSCCHPRLSLHRPALEDLLLGSEAILTCTLTGLRDASGVTFIWTPSSGKSAVQGPPDRDLCGCYSVSSVLPGCACPWNHGKTFICTAAYPESKTPLTATLSKSGNTFRPEVHLLPPPSEELALNELVTLTCLARGFSPKDVLVRWLQGSQELPREKYLTWASRQEPSQGTTTFAVTSILRVAACDWKKGDTFSCMVGHEALPLAFTQKTIDRLAGKPTHVNVSVVMAEVDADPSNNLLPSWAITLISVNGIFVICCLTYCFAPRCRERRRNERLRRESVRPV

SEQ ID NO: 622 - DNA, 996 bp, Artificial sequence; identical to SEQ ID NO: 328
  IgE Fc CH3--CH3-CH4

SEQ ID NO: 623 - protein, 330 aa, Artificial sequence
  IgE Fc CH3-CH3-CH4
DHVCSRDFTPPTVKILQSSCDGGGHFPTIQLLCLVSGYTPGTINITWLEDGQVMDVDLSTASTTQEGELASTQSELTLSQKHWLSDRTYTCQVTYQGHTFEDSTKKCADSNPRGVSAYLSRPSPFDLFIRKSPTITCLVVDLAPSKGTVNHWSRASGKPVNHSTRKEEKQRNGTLTVTSTLPVGTRDWIEGCTYQCRVTHPHLPRALMRSTTKTSGPRAAPEVYAFATPEWPGSRDKRTLACLIQNFRNPEDISVQWLHNEVQLPDARHSTTQPRKTKGSGFFVFSRLEVTRAEWEQKDEFICRAVHCAASPSQTVQRAVSVNPGKADPS

SEQ ID NO: 624 - DNA, 1921 bp, Artificial sequence
  1D8 IgE Fc CH3CH3CH4-CD80
aagcttatggattttcaagtgcagattttcagcttcctgctaatcagtgcttcagtcataatgtccagaggagtcgacattgtgctcactcagtctccaacaaccatagctgcatctccaggggagaaggtcaccatcacctgccgtgccagctccagtgtaagttacatgtactggtaccagcagaagtcaggcgcctcccctaaactctggatttatgacacatccaagctggcttctggagttccaaatcgcttcagtggcagtgggtctgggacctcttattctctcgcaatcaacaccatggagactgaagatgctgccacttattactgtcagcagtggagtagtactccgctcacgttcgggtctgggaccaagctggagatcaaacggggtggcggtggctcgggcggtggtgggtcgggtggcggcggatctcaggtgcagctgaaggaggcaggacctggcctggtgcaaccgacacagaccctgtccctcacatgcactgtctctgggttctcattaaccagcgatggtgtacactggattcgacagcctccaggaaagggtctggaatggatgggaataatatattatgatggaggcacagattataattcagcaattaaatccagactgagcatcagcagggacacctccaagagccaagttttcttaaaaatcaacagtctgcaaactgatgacacagccatgtattactgtgccagaatccactttgattactggggccaaggagtcatggtcacagtctcctctgatcacgtctgctccagggacttcaccccgcccaccgtgaagatcttacagtcgtcctgcgacggcggcgggcacttccccccgaccatccagctcctgtgcctcgtctctgggtacaccccagggactatcaacatcacctggctggaggacgggcaggtcatggacgtggacttgtccaccgcctctaccacgcaggagggtgagctggcctccacacaaagcgagctcaccctcagccagaagcactggctgtcagaccgcacctacacctgccaggtcacctatcaaggtcacacctttgaggacagcaccaagaagtgtgcagattccaacccgagaggggtgagcgcctacctaagccggcccagcccgttcgacctgttcatccgcaagtcgcccacgatcacctgtctggtggtggacctggcacccagcaaggggaccgtgaacctgacctggtcccgggccagtgggaagcctgtgaaccactccaccagaaaggaggagaagcagcgcaatggcacgttaaccgtcacgtccaccctgccggtgggcacccgagactggatcgagggggagacctaccagtgcagggtgacccacccccacctgcccagggccctcatgcggtccacgaccaagaccagcggcccgcgtgctgccccggaagtctatgcgtttgcgacgccggagtggccggggagccgggacaagcgcaccctcgcctgcctgatccagaacttcatgcctgaggacatctcggtgcagtggctgcacaacgaggtgcagctcccggacgcccggcacagcacgacgcagccccgcaagaccaagggctccggcttcttcgtcttcagccgcctggaggtgaccagggccgaatgggagcagaaagatgagttcatctgccgtgcagtccatgaggcagcgagcccctcacagaccgtccagcgagcggtgtctgtaaatcccggtaaagcggatccttcgaagctcccatcctgggccattaccttaatctcagtaaatggaatttttgtgatatgctgcctgacctactgctttgccccaagatgcagagagagaaggaggaatgagagattgagaagggaaagtgtacgccctgtataaatcgata

SEQ ID NO: 625 - protein, 633 aa, Artificial sequence
  1D8 IgE Fc CH3CH3CH4-CD80
MDFQVQIFSFLLISASVIMSRGVDIVHQSPTTIAASPGEKVTITCRASSSVSYMYWYQQKSGASPKLWIYDTSKLASGVPNRFSGSGSGTSYSLAINTMETEDAATYYCQQWSSTPLTFGSGTKLEIKRGGGGSGGGGSGGGGSQVQLKCAGPGLVQPTQTLSLTCTVSGFSLTSDGVHWIRQPPGKGLEWMGTTYYDGGTDYNSAIKSRLSISRDTSKSQVFLKINSLQTDDTAMYYCARIHFDYWGQGVMVTVSSDHVCSRDFTPPTVKILQSSCDGGGHFPPTIQLLCLVSGYTPGTINITWLEDGQVMDVDLSTASTTQEGELASTQSELTLSQKHWLSDRTYTCQVTYQGHTFEDSTKKCADSNPRGVSAYLSRPSPFDLFIRKSPTITCLVVDLAPSKGTVNLTWSRASGKPVNHSTRKEEKQMGTLTVTSTLPVGTRDWIEGETYQCRVTHPHLPRALMRSTTKTSGPRAAPEVYAFATPEWPGSRDKRTLACLIQNFMPEDISVQWLHNEVQLPDARHSTTQPRKTKGSGFFVFSRLEVTRAEWEQKDEFICRAVHCAASPSQTVQRAVSVNPGKADPSKLPSWAITLISVNGIFVICCLTYCFAPRCRERRRNERLRRESVRPV

SEQ ID NO: 626 - DNA, 1742 bp, Artificial sequence
  5B9 IgAH IgAT4-CD80
aagcttgccgccatgaggttctctgctcagcttctggggctgcttgtgctctggatccctggatccactgcagatattgtgatgacgcaggctgcattctccaatccagtcactcttggaacatcagcttccatctcctgcaggtctagtaagagtctcctacatagtaatggcatcacttatttgtattggtatctgcagaagccaggccagtctcctcagctcctgatttatcagatgtccaaccttgcctcaggagtcccagacaggttcagtagcagtgggtcaggaactgatttcacactgagaatcagcagagtggaggctgaggatgtgggtgtttattactgtgctcaaaatctagaacttccgctcacgttcggtgctgggaccaagctggagctgaaacggggtggcggtggctcgggcggtggtgggtcgggtggcggcggatcgtcacaggtgcagctgaagcagtcaggacctggcctagtgcagtcctcacagagcctgtccatcacctgcacagtctctggtttctcattaactacctatgctgtacactgggttcgccagtctccaggaaagggtctggagtggctgggagtgatatggagtggtggaatcacagactataatgcagctttcatatccagactgagcatcaccaaggacgattccaagagccaagttttctttaaaatgaacagtctgcaacctaatgacacagccatttattactgtgccagaaatgggggtgataactacccttattactatgctatggactactggggtcaaggaacctcagtcaccgtctcctctgatcagccagttccctcaactccacctaccccatctccctcaactccacctaccccatctccctcatgctgccacccccgactgtcactgcaccgaccggccctcgaggacctgctcttaggttcagaagcgatcctcacgtgcacactgaccggcctgagagatgcctcaggtgtcaccttcacctggacgccctcaagtgggaagagcgctgttcaaggaccacctgaccgtgacctctgtggctgctacagcgtgtccagtgtcctgccgggctgtgccgagccatggaaccatgggaagaccttcacttgcactgctgcctaccccgagtccaagaccccgctaaccgccaccctctcaaaatccggaaacacattccggcccgaggtccacctgctgccgccgccgtcggaggagctggccctgaacgagctggtgacgctgacgtgcctggcacgtggcttcagccccaaggatgtgctggttcgctggctgcaggggtcacaggagctgccccgcgagaagtacctgacttgggcatcccggcaggagcccagccagggcaccaccaccttcgctgtgaccagcatactgcgcgtggcagccgaggactggaagaagggggacaccttctcctgcatggtgggccacgaggccctgccgctggccttcacacagaagaccatcgaccgcttggcgggtaaacccacccatgtcaatgtgtctgttgtcatggcggaggtggacgcggatccttcgaacaacctgctcccatcctgggccattaccttaatctcagtaaatggaatttttgtgatatgctgcctgacctactgctttgccccaagatgcagagagagaaggaggaatgagagattgagaagggaaagtgtacgccctgtataaatcgatac

SEQ ID NO: 627 - protein, 573 aa, Artificial sequence
  5B9 IgAH IgAT4-CD80
MRFSAQLLGLLVLWIPGSTADIVMTQAAFSNPVTLGTSASISCRSSKSLLHSNGTTYLYWYLQKPGQSPQLLIYQMSNLASGVPDRFSSSGSGTDFTLRISRVEAEDVGVYYCAQNLELPLTFGAGTKLELKRGGGGSGGGGSGGGGSSQVQLKQSGPGLVQSSQSLSITCTVSGFSLTTYAVHWVRQSPGKGLEWLGVIWSGGTTDYNAAFISRISITKDDSKSQVFTKMNSLQPNDTAIYYCARNGGDNYPYYYAMDYWGQGTSVTVSSDQPVPSTPPTPSPSTPPTPSPSCCHPRLSLHRPALEDLLLGSEAILTCTLTGLRDASGVTFIWTPSSGKSAVQGPPDRDLCGCYSVSSVLPGCACPWNHGKTFICTAAYPESKTPLTATLSKSGNTFRPEVHLLPPPSEELALNELVTLTCLARGFSPKDVLVRWLQGSQELPREKYLTWASRQEPSQGTTTFAVTSILRVAACDWKKGDTFSCMVGHEALPLAFTQKTIDRLAGKPTHVNVSVVMAEVDADPSNNLLPSWAITLISVNGIFVICCLTYCFAPRCRERRRNERLRRESVRPV

SEQ ID NO: 628 - DNA, 1966 bp, Artificial sequence
  5B9 IgE Fc CH2-CH3-CH4-CD80
aagcttgccgccatgaggttctctgctcagcttctggggctgcttgtgctctggatccctggatccactgcagatattgtgatgacgcaggctgcattctccaatccagtcactcttggaacatcagcttccatctcctgcaggtctagtaagagtctcctacatagtaatggcatcacttatttgtattggtatctgcagaagccaggccagtctcctcagctcctgatttatcagatgtccaaccttgcctcaggagtcccagacaggttcagtagcagtgggtcaggaactgatttcacactgagaatcagcagagtggaggctgaggatgtgggtgtttattactgtgctcaaaatctagaacttccgctcacgttcggtgctgggaccaagctggagctgaaacggggtggcggtggctcgggcggtggtgggtcgggtggcggcggatcgtcacaggtgcagctgaagcagtcaggacctggcctagtgcagtcctcacagagcctgtccatcacctgcacagtctctggtttctcattaactacctatgctgtacactgggttcgccagtctccaggaaagggtctggagtggctgggagtgatatggagtggrggaatcacagactataatgcagctttcatatccagactgagcatcaccaaggacgattccaagagccaagttttctttaaaatgaacagtctgcaacctaatgacacagccatttattactgtgccagaaatgggggtgataactacccttattactatgctatggactactggggtcaaggaacctcagtcaccgtctcctctgatcacgtctgctccagggacttcaccccgcccaccgtgaagatcttacagtcgtcctgcgacggcggcgggcacttccccccgaccatccagctcctgtgcctcgtctctgggtacaccccagggactatcaacatcacctggctggaggacgggcaggtcatggacgtggacttgtccaccgcctctaccacgcaggagggtgagctggcctccacacaaagcgagctcaccctcagccagaagcactggctgtcagaccgcacctacacctgccaggtcacctatcaaggtcacacctttgaggacagcaccaagaagtgtgcagattccaacccgagaggggtgagcgcctacctaagccggcccagcccgttcgacctgttcatccgcaagtcgcccacgatcacctgtctggtggtggacctggcacccagcaaggggaccgtgaacctgacctggtcccgggccagtgggaagcctgtgaaccactccaccagaaaggaggagaagcagcgcaatggcacgttaaccgtcacgtccaccctgccggtgggcacccgagactggatcgagggggagacctaccagtgcagggtgacccacccccacctgcccagggccctcatgcggtccacgaccaagaccagcggcccgcgtgctgccccggaagtctatgcgtttgcgacgccggagtggccggggagccgggacaagcgcaccctcgcctgcctgatccagaacttcatgcctgaggacatctcggtgcagtggctgcacaacgaggtgcagctcccggacgcccggcacagcacgacgcagccccgcaagaccaagggctccggcttcttcgtcttcagccgcctggaggtgaccagggccgaatgggagcagaaagatgagttcatctgccgtgcagtccatgaggcagcgagcccctcacagaccgtccagcgagcggtgtctgtaaatcccggtaaagcggatccttcgaagctcccatcctgggccattaccttaatctcagtaaatggaatttttgtgatatgctgcctgacctactgctttgccccaagatgcagagagagaaggaggaatgagagattgagaagggaaagtgtacgccctgtataaatcgata

SEQ ID NO: 629 - protein, 648 aa, Artificial sequence
  5B9 IgE Fc CH2-CH3-CH4-CD80
MRFSAQLLGLLVLWIPGSTADIVMTQAAFSNPVTLGTSASISCRSSKSLLHSNGTTYLYWYLQKPGQSPQLLIYQMSNLASGVPDRFSSSGSGTDFILRISRVEAEDVGVYYCAQNLELPLTFGAGTKLELKRGGGGSGGGGSGGGGSSQVQLKQSGPGLVQSSQSLSITCTVSGFSLTTYAVHWVRQSPGKGLEWLGVIWSGGTTDYNAAFISRLSITKDDSKSQVFFKMNSLQPNDTAIYYCARNGGDNYPYYYAMDYWGQGTSVTVSSDHVCSRDFIPPTVKILQSSCDGGGHFPPTIQLLCLVSGYTPGTINITWLEDGQVMDVDLSTASTTQEGELASTQSELTLSQKHWLSDRTYTCQVTYQGHTFEDSTKKCADSNPRGVSAYLSRPSPFDLFIRKSPTITCLVVDLAPSKGTVNLTWSRASGKPVNHSTRKEEKQRNGTLTVTSTLPVGTRDWIEGCTYQCRVTHPHLPRALMRSTTKTSGPRAAPEVYAFATPEWPGSRDKRTLACLIQNFRNPEDISVQWLHNEVQLPDARHSTTQPRKTKGSGFFVFSRLEVTRAEWEQKDEFICRAVHEAASPSQTVQRAVSVNPGKADPSKLPSWAITLISVNGIFVICCLTYCFAPRCRERRMERLRRESVRPV

SEQ ID NO: 630 - DNA, 1736 bp, Artificial sequence
  2e12 IgAH IgAT4-CD80
aagcttatggattttcaagtgcagattttcagcttcctgctaatcagtgcttcagtcataatgtccagaggagtcgacattgtgctcacccaatctccagcttctttggctgtgtctctaggtcagagagccaccatctcctgcagagccagtgaaagtgttgaatattatgtcacaagtttaatgcagtggtaccaacagaaaccaggacagccacccaaactcctcatctctgctgcatccaacgtagaatctggggtccctgccaggtttagtggcagtgggtctgggacagacttcagcctcaacatccatcctgtggaggaggatgatattgcaatgtatttctgtcagcaaagtaggaaggttccttggacgttcggtggaggcaccaagctggaaatcaaacggggtggcggtggctcgggcggaggtgggtcgggtggcggcggatctcaggtgcagctgaaggagtcaggacctggcctggtggcgccctcacagagcctgtccatcacatgcaccgtctcagggttctcattaaccggctatggtgtaaactgggttcgccagcctccaggaaagggtctggagtggctgggaatgatatggggtgatggaagcacagactataattcagctctcaaatccagactgagcatcaccaaggacaactccaagagccaagttttcttaaaaatgaacagtctgcaaactgatgacacagccagatactactgtgccagagatggttatagtaactttcattactatgttatggactactggggtcaaggaacctcagtcaccgtctcctcagatcagccagttccctcaactccacctaccccatctccctcaactccacctaccccatctccctcatgctgccacccccgactgtcactgcaccgaccggccctcgaggacctgctcttaggttcagaagcgatcctcacgtgcacactgaccggcctgagagatgcctcaggtgtcaccttcacctggacgccctcaagtgggaagagcgctgttcaaggaccacctgaccgtgacctctgtggctgctacagcgtgtccagtgtcctgccgggctgtgccgagccatggaaccatgggaagaccttcacttgcactgctgcctaccccgagtccaagaccccgctaaccgccaccctctcaaaatccggaaacacattccggcccgaggtccacctgctgccgccgccgtcggaggagctggccctgaacgagctggtgacgctgacgtgcctggcacgtggcttcagccccaaggatgtgctggttcgctggctgcaggggtcacaggagctgccccgcgagaagtacctgacttgggcatcccggcaggagcccagccagggcaccaccaccttcgctgtgaccagcatactgcgcgtggcagccgaggactggaagaagggggacaccttctcctgcatggtgggccacgaggccctgccgctggccttcacacagaagaccatcgaccgcttggcgggtaaacccacccatgtcaatgtgtctgttgtcatggcggaggtggacgcggatccttcgaacaacctgctcccatcctgggccattaccttaatctcagtaaatggaatttttgtgatatgctgcctgacctactgctttgccccaagatgcagagagagaaggaggaatgagagattgagaagggaaagtgtacgccctgtataaatcgatac

SEQ ID NO: 631 - protein, 571 aa, Artificial sequence
  2e12 IgAH IgAT4-CD80
MDFQVQIFSFLLISASVIRNSRGVDIVLTQSPASLAVSLGQRATISCRASESVEYYVTSLMQWYQQKPGQPPKLLISAASNVESGVPARFSGSGSGTDFSLNIHPVEEDDIAMYFCQQSRKVPWTFGGGTKLEIKRGGGGSGGGGSGGGGSQVQLKESGPGLVAPSQSLSITCTVSGFSLTGYGVNWVRQPPGKGLEWLGMIWGDGSTDYNSALKSRLSITKDNSKSQVFLKNSLQTDDTARYYCARDGYSNFHYYVMDYWGQGTSVTVSSDQPVPSTPPTPSPSTPPTPSPSCCHPRLSHRPALEDLLLGSEAILTCTLTGLRDASGVTFLWTPSSGKSAVQGPPDRDLCGCYSVSSVLPGCACPWNHGKTFTCTAAYPESKTPLTATLSKSGNTFREVHLLPPPSEELALNEIVTLTCLARGFSPKDVLVRWIQGSQELPREKYLTWASRQEPSQGTTTFAVTSILRVAAEDWKKGDTFSCMVGHEALPLAFTQKTIDRLAGKPTHVNVSVVMAEVDADPSNNLLPSWAITLISVNGIFVICCLTYCFAPRCRERRRNERLRRESVRPV

SEQ ID NO: 632 - DNA, 1960 bp, Artificial sequence
  2e12 IgE Fc CH2-CH3-CH4-CD80
aagcttatggattttcaagtgcagattttcagcttcctgctaatcagtgcttcagtcataatgtccagaggagtcgacattgtgctcacccaatctccagcttctttggctgtgtctctaggtcagagagccaccatctcctgcagagccagtgaaagtgttgaatattatgtcacaagtttaatgcagtggtaccaacagaaaccaggacagccacccaaactcctcatctctgctgcatccaacgtagaatctggggtccctgccaggtttagtggcagtgggtctgggacagacttcagcctcaacatccatcctgtggaggaggatgatattgcaatgtatttctgtcagcaaagtaggaaggttccttggacgttcggtggaggcaccaagctggaaatcaaacggggtggcggtggctcgggcggaggtgggtcgggtggcggcggatctcaggtgcagctgaaggagtcaggacctggcctggtggcgccctcacagagcctgtccatcacatgcaccgtctcagggttctcattaaccggctatggtgtaaactgggttcgccagcctccaggaaagggtctggagtggctgggaatgatatggggtgatggaagcacagactataattcagctctcaaatccagactgagcatcaccaaggacaactccaagagccaagttttcttaaaaatgaacagtctgcaaactgatgacacagccagatactactgtgccagagatggttatagtaactttcattactatgttatggactactggggtcaaggaacctcagtcaccgtctcctcagatcacgtctgctccagggacttcaccccgcccaccgtgaagatcttacagtcgtcctgcgacggcggcgggcacttccccccgaccatccagctcctgtgcctcgtctctgggtacaccccagggactatcaacatcacctggctggaggacgggcaggtcatggacgtggacttgtccaccgcctctaccacgcaggagggtgagctggcctccacacaaagcgagctcaccctcagccagaagcactggctgtcagaccgcacctacacctgccaggtcacctatcaaggtcacacctttgaggacagcaccaagaagtgtgcagattccaacccgagaggggtgagcgcctacctaagccggcccagcccgttcgacctgttcatccgcaagtcgcccacgatcacctgtctggtggtggacctggcacccagcaaggggaccgtgaacctgacctggtcccgggccagtgggaagcctgtgaaccactccaccagaaaggaggagaagcagcgcaatggcacgttaaccgtcacgtccaccctgccggtgggcacccgagactggatcgagggggagacctaccagtgcagggtgacccacccccacctgcccagggccctcatgcggtccacgaccaagaccagcggcccgcgtgctgccccggaagtctatgcgtttgcgacgccggagtggccggggagccgggacaagcgcaccctcgcctgcctgatccagaacttcatgcctgaggacatctcggtgcagtggctgcacaacgaggtgcagctcccggacgcccggcacagcacgacgcagccccgcaagaccaagggctccggcttcttcgtcttcagccgcctggaggtgaccagggccgaatgggagcagaaagatgagttcatctgccgtgcagtccatgaggcagcgagcccctcacagaccgtccagcgagcggtgtctgtaaatcccggtaaagcggatccttcgaagctcccatcctgggccattaccttaatctcagtaaatggaatttttgtgatatgctgcctgacctactgctttgccccaagatgcagagagagaaggaggaatgagagattgagaagggaaagtgtacgccctgtataaatcgata

SEQ ID NO: 633 - protein, 649 aa, Artificial sequence [sequence omitted]

SEQ ID NO: 634 - DNA, 793 bp, Artificial sequence; identical to SEQ ID NO: 399
  500A2 scFv

SEQ ID NO: 635 - protein, 263 aa, Artificial sequence
  500A2 scFv
MLYTSQLLGLLLFWISASRSDIVLTQTPATLSLIPGERVTMTCKTSQNIGTILHWYHQKPKEAPRALIKYASQSIPGIPSRFSGSGSETDFTLSINNLEPDDIGIYYCQQSRSWPVTFGPGTKLEIKRGGGGSGGGGSGGGGSQVKLQQSGSELGKPGASVKLSCKTSGYIFTDHYISWVKQKPGESIQWIGNVYGGNGGTSYNQKFQGKATLTVDKISSTAYMESSLTSEDSAIYYCARRPVATGHAMDYWGQGIQVTVSSD

SEQ ID NO: 636 - DNA, 36 bp, Artificial sequence; identical to SEQ ID NO: 401
  Primer

SEQ ID NO: 637 - DNA, 44 bp, Artificial sequence; identical to SEQ ID NO: 402
  Primer

SEQ ID NO: 638 - DNA, 47 bp, Artificial sequence; identical to SEQ ID NO: 403
  Primer

SEQ ID NO: 639 - DNA, 45 bp, Artificial sequence; identical to SEQ ID NO: 404
  Primer

SEQ ID NO: 640 - DNA, 48 bp, Artificial sequence; identical to SEQ ID NO: 405
  Primer

SEQ ID NO: 641 - DNA, 51 bp, Artificial sequence
  Primer
gttgttatcgatctcgagttatcaggacgcttcggaggtagatgcgtcadd

SEQ ID NO: 642 - DNA, 657 bp, Artificial sequence; identical to SEQ ID NO: 407
  CssCFv

SEQ ID NO: 643 - protein, 210 aa, Artificial sequence
  CssCFv
VDPSNPFLVLLHSVSSSLSSSELTELKFLCLGRVGKRKLERVQSGLDLFSMLLEQNDLEPGHTELLRELLASLRRHDLLRRVDDFCAGAAAGAAPGCCDLCAAFHVICDNVGKDWRRLARQLKVSDTKIDSIEDRYPMLTERVRESLRIWKNTEKENATVAHLVGALRSCQMNLVADLVQEVQQARDLQNRSGAMSPMSWNSDASTSEAS

SEQ ID NO: 644 - DNA, 60 bp, Artificial sequence; identical to SEQ ID NO: 409
  Primer

SEQ ID NO: 645 - DNA, 60 bp, Artificial sequence; identical to SEQ ID NO: 410
  Primer

SEQ ID NO: 646 - DNA, 32 bp, Artificial sequence; identical to SEQ ID NO: 411
  Primer

SEQ ID NO: 647 - DNA, 33 bp, Artificial sequence; identical to SEQ ID NO: 412
  Primer

SEQ ID NO: 648 - DNA, 28 bp, Artificial sequence
  Primer
gttgtggatcctcctgctcccatcctgg

SEQ ID NO: 649 - DNA, 32 bp, Artificial sequence; identical to SEQ ID NO: 414
  Primer

SEQ ID NO: 650 - DNA, 45 bp, Artificial sequence; identical to SEQ ID NO: 415
  Primer

SEQ ID NO: 651 - DNA, 42 bp, Artificial sequence; identical to SEQ ID NO: 416
  Primer

SEQ ID NO: 652 - DNA, 645 bp, Mus musculus; identical to SEQ ID NO: 417

SEQ ID NO: 653 - protein, 209 aa, Mus musculus
VDPSNMDPFLVLLHSLSGSLSGNDLMELKFLCRERVSKRKLERVQSGLDLFTVLLEQNDLERGHTGLLRELLASLRRHDLLQRLDDFCAGTATAAPPGCADQVAFDIVCDNVGRDWKRLARELKVSEAKMDGIEEKYPRSLSERVRESLKVWKNAEKKNASVAGLVKALRTCRLNLVADLVEEAQCSVSKSENMSPVLRDSTVSSSETP

SEQ ID NO: 654 - DNA, 48 bp, Artificial sequence; identical to SEQ ID NO: 419
  Primer

SEQ ID NO: 655 - DNA, 45 bp, Artificial sequence
  Primer
gttgttatcgatctcgagctagtgataaaagtacagttctttcgt

SEQ ID NO: 656 - DNA, 46 bp, Artificial sequence; identical to SEQ ID NO: 421
  Primer

SEQ ID NO: 657 - DNA, 48 bp, Artificial sequence; identical to SEQ ID NO: 422
  Primer

SEQ ID NO: 658 - DNA, 45 bp, Artificial sequence; identical to SEQ ID NO: 423
  Primer

SEQ ID NO: 659 - DNA, 48 bp, Artificial sequence; identical to SEQ ID NO: 424
  Primer

SEQ ID NO: 660 - DNA, 45 bp, Artificial sequence; identical to SEQ ID NO: 425
  Primer

SEQ ID NO: 661 - DNA, 48 bp, Artificial sequence; identical to SEQ ID NO: 426
  Primer

SEQ ID NO: 662 - DNA, 91 bp, Artificial sequence; identical to SEQ ID NO: 332
  Synthetic nucleotide

SEQ ID NO: 663 - DNA, 1798 bp, Artificial sequence
  2H7-human IgE CH2-CH3-CH4
aagcttgccgccatggattttcaagtgcagattttcagcttcctgctaatcagtgcttcagtcataattgccagaggacaaattgttctctcccagtctccagcaatcctgtctgcatctccaggggagaaggtcacaatgacttgcagggccagctcaagtgtaagttacatgcactggtaccagcagaagccaggatcctcccccaaaccctggatttatgccccatccaacctggcttctggagtccctgctcgcttcagtggcagtgggtctgggacctcttactctctcacaatcagcagagtggaggctgaagatgctgccacttattactgccagcagtggagttttaacccacccacgttcggtgctgggaccaagctggagctgaaaggtggcggtggctcgggcggtggtggatctggaggaggtgggagctctcaggcttatctacagcagtctggggctgagctggtgaggcctggggcctcagtgaagatgtcctgcaaggcttctggctacacatttaccagttacaatatgcactgggtaaagcagacacctagacagggcctggaatggattggagctatttatccaggaaatggtgatacttcctacaatcagaagttcaagggcaaggccacactgactgtagacaaatcctccagcacagcctacatgcagctcagcagcctgacatctgaagactctgcggtctatttctgtgcaagagtggtgtactatagtaactcttactggtacttcgatgtctggggcacagggaccacggtcaccgtctctgatcacgtctgctccagggacttcaccccgcccaccgtgaagatcttacagtcgtcctgcgacggcggcgggcacttccccccgaccatccagctcctgtgcctcgtctctgggtacaccccagggactatcaacatcacctggctggaggacgggcaggtcatggacgtggacttgtccaccgcctctaccacgcaggagggtgagctggcctccacacaaagcgagctcaccctcagccagaagcactggctgtcagaccgcacctacacctgccaggtcacctatcaaggtcacacctttgaggacagcaccaagaagtgtgcagattccaacccgagaggggtgagcgcctacctaagccggcccagcccgttcgacctgttcatccgcaagtcgcccacgatcacctgtctggtggtggacctggcacccagcaaggggaccgtgaacctgacctggtcccgggccagtgggaagcctgtgaaccactccaccagaaaggaggagaagcagcgcaatggcacgttaaccgtcacgtccaccctgccggtgggcacccgagactggatcgagggggagacctaccagtgcagggtgacccacccccacctgcccagggccctcatgcggtccacgaccaagaccagcggcccgcgtgctgccccggaagtctatgcgtttgcgacgccggagtggccggggagccgggacaagcgcaccctcgcctgcctgatccagaacttcatgcctgaggacatctcggtgcagtggctgcacaacgaggtgcagctcccggacgcccggcacagcacgacgcagccccgcaagaccaagggctccggcttcttcgtcttcagccgcctggaggaccagggccgaatgggagcagaaagatgagttcatctgccgtgcagtccatgaggcagcgagcccctcacagaccgtccagcgagcggtgtctgtaaatcccggtaaatgataatctaga

SEQ ID NO: 664 - protein, 592 aa, Artificial sequence
  2H7-human IgE CH2-CH3-CH4)
MDFQVQIFSFLLISASVIIARGQIVLSQSPAILSASPGEKVTMTCRASSSVSYMHWYQQKPGSSPKPWIYAPSNLASGVPARFSGSGSGTSYSLTISRVEAEDAATYYCQQWSFNPPTFGAGTKLELKGGGGSGGGGSGGGGSSQAYLQQSGACLVRPGASVKMSCKASGYTFTSYNMHWVKQTPRQGLEWIGAIYPGNGDTSYNQKFKGKATLTVDKSSSTAYMQLSSLTSEDSAVYFCARVVYYSNSYWYFDVWGTGTTVTVSDHVCSRDFTPPTVKILQSSCDGGGHFPPTIQLLCLVSGYTPGTINITWLEDGQVMDVDLSTASTTQEGELASTQSELTLSQKHWLSDRTYTCQVTYQGHTFEDSTKKCADSNPRGVSAYLSRPSPFDLFIRKSPTITCLVVDLAPSKGTVNLTWSRASGKPVNHSTRKEEKQRNGTLTVTSTLPVGTRDWIEGCTYQCRVTHPHLPRALMRSTTKTSGPRAAPEVYAFATPEWPGSRDKRTLACLIQNFMPEDISVQWLHNEVQLPDARHSTTQPRKTKGSGFFVFSRLEVTRAEWEQKDEFICRAVHCAASPSQTVQRAVSVNPGK

SEQ ID NO: 665 - DNA, 1521 bp, Artificial sequence; identical to SEQ ID NO: 351
  2H7 scFv MH(SSS) MCH2WTCH3

SEQ ID NO: 666 - protein, 499 aa, Artificial sequence
  2H7 scFv MH(SSS) MCH2WTCH3
MDFQVQIFSFLLISASVIIARGQIVLSQSPAILSASPGEKVTMTCRASSSVSYMHWYQQKPGSSPKPWIYAPSNLASGVPARFSGSGSGTSYSHISRVEAEDAATYYCQQESFNPPTFGAGTKLELKDGGGSGGGGSGGGGSSQAYLQQSGAELVRPGASVKMSCKASGYTFTSYNMHWVKQTPRQGLEWIGAIYPGNGDTSYNQKFKGKATLTVDKSSSTAYMQLSSLTSEDSAVYFCARVVYYSNSYWYFDVWGTGTTVTVSSDQEPKSSDKTHTSPPSPAPELLGGSSVFLFPPKPKDTLMISRTPEVTCVVVDVSHEDPEVKFNWYVDGVEVHNAKTKPREEQYNSTYRVVSVLTVLHQDWLNGKEYKCKVSNKALPAPIEKTISKAKGQPREPQVYTLPPSRDELTKNQVSLTCLVKGFYPSDIAVEWESNGQPENNYKTTPPVLDSDGSFFLYSKLTVDKSRWQQGNVFSCSVMHEALHNHYTQKSLSLSPGK

SEQ ID NO: 667 - DNA, 1532 bp, Artificial sequence
  5B9 scFv MTHWTCH2CH3
aagcttgccgccatgaggttctctgctcagcttctggggctgcttgtgctctggatccctggatccactgcagatattgtgatgacgcaggctgcattctccaatccagtcactcttggaacatcagcttccatctcctgcaggtctagtaagagtctcctacatagtaatggcatcacttatttgtattggtatctgcagaagccaggccagtctcctcagctcctgatttatcagatgtccaaccttgcctcaggagtcccagacaggttcagtagcagtgggtcaggaactgatttcactgagaatcagcagagtggaggctgaggatgcctatttattactgtgctcaaaatctagaacttccgctcacgttcggtgctgggaccaagctggagctgaaacggggtggcggtggctcgggcggtggtgggtcgggtggcggcggatcgtcacaggtgcagctgaagcagtcaggacctggcctagtgcagtcctcacagagcctgtccatcacctgcacagtctctggtttctcattaactacctatgctgtacactgggttcgccagtctccaggaaagggtctggagtggctgggagtgatatggagtggtggaatcacagactataatgcagctttcatatccagactgagcatcaccaaggacgattccaagagccaagttttctttaaaatgaacagtctgcaacctaatgacacagccatttattactgtgccagaaatgggggtgataactacccttattactatgctatggactactggggtcaaggaacctcagtcaccgtctcctctgatcaggagcccaaatcttctgacaaaactcacacatccccaccgtccccagcacctgaactcctggggggaccgtcagtcttcctcttccccccaaaacccaaggacaccctcatgatctcccggacccctgaggtcacatgcgtggtggtggacgtgagccacgaagaccctgaggtcaagttcaactggtacgtggacggcgtggaggtgcataatgccaagacaaagccgcgggaggagcagtacaacagcacgtaccgtgtggtcagcgtcctcaccgtcctgcaccaggactggctgaatggcaaggagtacaagtgcaaggtctccaacaaagccctcccagcccccatcgagaaaacaatctccaaagccaaagggcagccccgagaaccacaggtgtacaccctgcccccatcccgggatgagctgaccaagaaccaggtcagcctgacctgcctggtcaaaggcttctatcccagcgacatcgccgtggagtgggagagcaatgggcagccggagaacaactacaagaccacgcctcccgtgctggactccgacggctccttcttcctctacagcaagctcaccgtggacaagagcaggtggcagcaggggaacgtcttctcatgctccgtgatgcatgaggctctgcacaaccactacacgcagaagagcctctccctgtctccgggtaaatgatctaga

SEQ ID NO: 668 - protein, 503 aa, Artificial sequence
  5B9 scFv MTHWTCH2CH3
MRFSAQLLGLLVLWIPGSTADIVMTQAAFSNPVTLGTSASISCRSSKSLLHSNGTTYLYWYLQKPGQSPQLLIYQMSNLASGVPDRFSSSGSGTDFTLRISRVEAEDVGVYYCAQNLELPLTFGAGTKLELKGGGGSGGGGSGGGGSSQVQLKQSGPGLVQSSQSLSITCTVSGFSLTTYAVHWVRQSPGKGLEWLGVIWSGGITDYNAAFISRLSITKDDSKSQVFFKMNSLQPNDTAIYYCARNGGDNYPYYYAMDYWGQGTSVTVSSDQEPKSSDKTHTSPPSPAPELLGGPSVFLFPPKPKDTLMISRTPEVTCVVVDVSHEDPEVKFNWYVDGVEVHNAKTKPREEQYNSTYRVVSVLTVLHQDWLNGKEYKCKVSNKALPAPIEKTISKAKGQPREPQVYTLPPSRDELTKNQVSLTCLVKGFYPSDIAVEWESNGQPENNYKTTPPVLDSDGSFAYSKLTVDKSRWQQGNVFSCSVMHEALHNHYTQKSLSLSPGK
